(19) United States
(12) Patent Application Publication
(10) Pub. No.: US 2026/0009049 A1
(43) Pub. Date: Jan. 8, 2026

(54) COMPOSITIONS FOR TREATING XLMTM

(71) Applicant: KATE THERAPEUTICS, INC., San Diego, CA (US)

(72) Inventors: Mark Fielden, San Diego, CA (US); Mohammadsharif Tabebordbar, San Diego, CA (US); Saurav Seshadri, San Diego, CA (US)

(21) Appl. No.: 18/868,544

(22) PCT Filed: May 11, 2023
(86) PCT No.: PCT/US2023/066865

§ 371 Date: Nov. 22, 2024

Related U.S. Application Data
(60) Provisional application No. 63/345,144, filed on May 24, 2022.

(51) Int. Cl. C12N 15/86; A61K 35/76; A61K 38/46; A61K 48/00; A61P 21/00; C07K 14/005; C12N 9/16

(52) U.S. Cl. CPC C12N 15/86; A61K 35/76; A61K 38/465; A61K 48/0041; A61K 48/0058; A61P 21/00; C07K 14/005; C12N 9/16; C12Y 301/03064

(57) ABSTRACT

The present invention provides a novel muscle-tropic viral vector that achieves MTM1 expression in skeletal muscle. Advantageously, by increasing expression of MTM1 in skeletal muscle, the vector of the present allows for administration of a dose of the composition comprising the vector that substantially reduces the exposure of non-target tissues to the composition.

### FIELD OF DISCLOSURE

[0001] This disclosure relates methods for treating X-linked myotubular myopathy (XLMTM).

### SEQUENCE LISTING

[0002] The instant application contains a Sequence Listing in XML format, which is hereby incorporated by reference in its entirety. Said XML copy, created on Sep. 29, 2025, is named “51037-095001_Sequence Listing_9_29_25” and is 2,027,680 bytes in size.

### BACKGROUND

[0003] X-linked myotubular myopathy (XLMTM) is a rare, grievous congenital neuromuscular disease, occurring in approximately 1 in 50,000 live male births. XLMTM results from pathogenic variants in the myotubularin (MTM1) gene, which encodes the protein myotubularin, a ubiquitously expressed lipid phosphatase that regulates intracellular membrane trafficking and vesicular transport, and whose function is required for the normal development, maturation, and maintenance of skeletal muscle. Reductions in functional myotubularin are associated with the profound skeletal muscle weakness responsible for the most prominent clinical manifestations of this disease.

[0004] Nearly all boys with XLMTM present at birth with abnormal Apgar scores, severe hypotonia and weakness, and respiratory distress; approximately 90% require mechanical respiratory support. Affected boys have dramatically shortened lifespan, dying at a median age of approximately 18 months, usually due to respiratory failure and its complications.

[0005] The quality of life for the vast majority of affected boys is also poor, as highlighted in a recently published chart review. Patients spend approximately one-third to one-half of their first year of life in the hospital, and rehospitalization for pneumonia and other respiratory indications is common. Even with aggressive supportive therapy to prolong life, boys with XLMTM reach motor milestones late if ever, and rarely achieve independent locomotion. Most require lifelong mechanical respiratory support; approximately half require mechanical ventilation 24 hours per day. Surgical procedures are also common; tracheostomy is often required for patients with long-term ventilator dependence, and nearly all patients require gastrostomy due to weakness impairing feeding ability.

[0006] Advances in diagnostic techniques, and particularly genetic testing, have accelerated the time to diagnosis of XLMTM, now typically made within the first 3 to 4 months of life. Therapeutic development efforts are ongoing, but there are currently no approved medicines for the treatment of XLMTM. Supportive care, as described above, can prolong survival but does not alter the course of the disease.

[0007] Therapeutic strategies under investigation include AT132 (resamirigene bilparvovec), an intravenously delivered gene therapy consisting of an AAV8 capsid that delivers human MTM1 with a desmin promoter. To date, selected data has been publicly presented on 23 participants who have received AT132 in a Phase 1/2 clinical trial (ASPIRO, NCT03199469). This approach has shown substantial improvements in clinical outcomes, with many participants experiencing improvements in motor function as assessed by CHOP-INTEND, and major reductions in ventilator support requirements, with some participants gaining complete freedom from mechanical ventilation.

[0008] Unfortunately, AT132 has also been associated with serious safety findings, notably severe intrahepatic cholestasis leading to liver failure and death in four participants. Liver toxicity has been reported with other gene therapies, typically with prominent elevations in transaminases and resolving with supportive care, sometimes combined with steroids. In contrast, hepatotoxicity in the AT132 program has been characterized by cholestasis, which in some cases has been severe, progressive, and reportedly not responsive to immunosuppression nor prevented by addition of prophylactic ursodeoxycholic acid.

[0009] As a consequence, there remain no approved medicines for the treatment of XLMTM, leaving the population of those suffering form the condition with a great unmet medical need.

### SUMMARY

[0010] The present invention provides a novel muscle-tropic viral vector that achieves MTM1 expression in skeletal muscle. Advantageously, by increasing expression of MTM1 in skeletal muscle, the vector of the present invention allows for administration of a dose of the composition comprising the vector that substantially reduces the exposure of non-target tissues to the composition. The more effective dosing enables methods of treating XLMTM with clinical efficacy (improvements in muscle strength and reduced need for mechanical ventilation) and with improved safety, in particular, reduced risk of hepatoxicity in this population with great unmet medical need.

[0011] Methods of the invention provide an adeno-associated virus (AAV) vector comprising a capsid protein with at least one modification that results in preferential targeting of the AAV vector to muscle tissue. The vector further comprises a nucleic acid encoding a full-length MTM1 protein.

[0012] The capsid protein may further comprise at least one modification that results in reduced liver-tropism of the AAV vector.

[0013] The AAV may be any known AAV, for example AAV9. The capsid protein may comprise at least one modification that is an insertion between any two contiguous amino acids between amino acids 262-269, 327-332, 382-386, 452-460, 488-505, 527-539, 545-558, 581-593, 704-714, or any combination thereof in an AAV9 capsid polypeptide or in an analogous position in an AAV1, AAV2, AAV3, AAV4, AAV5, AAV6, AAV7, AAV8, AAV rh.74, AAV rh. 10 capsid polypeptide. For example, the capsid protein may comprise at least one modification that is a replacement of amino acids 586-588 and an insertion between amino acids 588 and 589 in an AAV9 capsid polypeptide or in an analogous position in an AAV1, AAV2, AAV3, AAV4, AAV5, AAV6, AAV7, AAV8, AAV rh.74, AAV rh. 10 capsid polypeptide. The capsid protein may comprise at least one modification that is a replacement of amino acids 586-588 and an insertion between amino acids 588 and 589 in an AAV9 capsid polypeptide and wherein the insertion is selected from the sequences in Table 1-4, provided in detail below.

[0014] The vector may comprise a vp1, vp2, and vp3 capsid protein. The amino acid sequence of the vp1 capsid protein may be selected from the sequences in Table 5, the amino acid sequence vp2 capsid protein may be selected from the sequences in Table 6, and/or the amino acid sequence vp3 capsid protein is selected from the sequences in Table 7, each of which is provided in detail below.

[0015] The nucleic acid encoding the full-length MTM1 protein may be operably linked to a muscle specific promoter. The muscle specific promoter may be any known muscle specific promoter. For example, the muscle specific promoter is an MHCK7 promoter.

[0016] The nucleic acid encoding the full-length MTM1 protein may comprise an alternatively-spliced exon cassette downstream of the muscle specific promoter. The alternatively-sliced exon cassette may comprise an ATG start codon at the 3′ end of the cassette. The alternatively-spliced exon cassette may comprise a skeletal muscle-specific exon. Advantageously, the alternatively spliced exon cassette may promote skeletal muscle expression of the nucleic acid. As a consequence, both the AAV capsid and the nucleic acid encoding MTM1 delivered by the capsid both result in increased skeletal muscle expression.

[0017] Aspects of the present invention provide methods of treating X-linked myotubular myopathy (XLMTM). The method comprises administering to a subject afflicted with XLMTM a composition comprising an adeno-associated virus (AAV) vector comprising a capsid protein comprising at least one modification that results in in preferential targeting of the AAV vector to muscle tissue and a nucleic acid encoding a full-length MTM1 protein.

[0018] The capsid protein may further comprise at least one modification that results in reduced liver-tropism of the AAV vector.

[0019] The AAV may be any known AAV, for example AAV9. The capsid protein may comprise at least one modification that is an insertion between any two contiguous amino acids between amino acids 262-269, 327-332, 382-386, 452-460, 488-505, 527-539, 545-558, 581-593, 704-714, or any combination thereof in an AAV9 capsid polypeptide or in an analogous position in an AAV1, AAV2, AAV3, AAV4, AAV5, AAV6, AAV7, AAV8, AAV rh.74, AAV rh.10 capsid polypeptide. For example, the capsid protein may comprise at least one modification that is a replacement of amino acids 586-88 and an insertion between amino acids 588 and 589 in an AAV9 capsid polypeptide or in an analogous position in an AAV1, AAV2, AAV3, AAV4, AAV5, AAV6, AAV7, AAV8, AAV rh.74, AAV rh.10 capsid polypeptide. The capsid protein may comprise at least one modification that is a replacement of amino acids 586-88 and an insertion between amino acids 588 and 589 in an AAV9 capsid polypeptide and wherein the insertion is selected from the sequences in Table 1-4, provided in detail below.

[0020] The vector may comprise a vp1, vp2, and vp3 capsid protein. The amino acid sequence of the vp1 capsid protein may be selected from the sequences in Table 5, the amino acid sequence vp2 capsid protein may be selected from the sequences in Table 6, and/or the amino acid sequence vp3 capsid protein is selected from the sequences in Table 7, each of which is provided in detail below.

[0021] The nucleic acid encoding the full-length MTM1 protein may be operably linked to a muscle specific promoter. The muscle specific promoter may be any known muscle specific promoter. For example, the muscle specific promoter is an MHCK7 promoter.

[0022] The nucleic acid encoding the full-length MTM1 protein may comprise an alternatively-spliced exon cassette downstream of the muscle specific promoter. The alternatively-sliced exon cassette may comprise an ATG start codon at the 3′ end of the cassette. The alternatively-spliced exon cassette may comprise a skeletal muscle-specific exon. Advantageously, the alternatively spliced exon cassette may promote skeletal muscle expression of the nucleic acid. As a consequence, both the AAV capsid and the nucleic acid encoding MTM1 delivered by the capsid both result in increased skeletal muscle expression.

TABLE 1
MyoAAV (eMyoAAV) Capsid Variants

| | | SEQ | | SEQ |
|---|---|---|---|---|
| | | ID | | ID |
| RANK | N-MER MOTIF | NO.: | ENCODING SEQUENCE | NO.: |
| 1 | AEGRGDQYTR | 177 | GCTGAGGGTAGAGGAGACCAGTATACTCGT | 181 |
| 2 | GPGRGDQTTL | 178 | GGGCCGGGTAGAGGAGACCAGACTACGTTG | 182 |
| 3 | AEGRGDQYTR | 177 | GCGGAAGGCAGAGGAGACCAATACACAAGG | 183 |
| 4 | ATGRGDLGQA | 179 | GCGACTGGTAGAGGAGACCTGGGTCAGGCT | 184 |
| 5 | AVARGDQGLI | 180 | GCGGTGGCGAGAGGAGACCAGGGTCTTATT | 185 |
| 6 | NISRGDQGYQ | 6 | AACATCTCCAGAGGAGACCAAGGTTACCAA | 186 |
| 7 | APARGDQGSQ | 7 | GCGCCGGCTAGAGGAGACCAGGGGAGTCAG | 187 |
| 8 | AVSRGDRMEF | 8 | GCCGTTAGCAGAGGAGACCGGATGGAATTC | 188 |
| 9 | QMGRGDMGIK | 10 | CAGATGGGTAGAGGAGACATGGGGATTAAG | 189 |
| 10 | EYRRGDKADI | 11 | GAGTATCGGAGAGGAGACAAGGCGGATATT | 190 |
| 11 | ESRRGDKEPL | 12 | GAGAGTCGGAGAGGAGACAAGGAGCCGCTG | 191 |
| 12 | AHMRGDLGGT | 13 | GCACACATGAGAGGAGACCTAGGCGGCACG | 192 |
| 13 | VWQRGDKMDM | 14 | GTGTGGCAAAGAGGAGACAAAATGGACATG | 193 |
| 14 | SIGRGDTGHM | 15 | TCTATTGGGAGAGGAGACACGGGTCATATG | 194 |
| 15 | NIARGDAGQY | 16 | AATATTGCTAGAGGAGACGCTGGTCAGTAT | 195 |
| 16 | AVARGDQGLI | 180 | GCAGTAGCAAGAGGAGACCAAGGCTTAATC | 196 |
| 17 | SVSRGDQGLH | 17 | TCGGTCTCGAGAGGAGACCAAGGATTGCAC | 197 |
| 18 | EYRRGDKADI | 11 | GAATACAGGAGAGGAGACAAAGCAGACATC | 198 |
| 19 | AHMRGDLGGT | 13 | GCGCATATGAGAGGAGACTTGGGGGGGACT | 199 |
| 20 | QIGRGDITHG | 18 | CAGATTGGTAGAGGAGACATTACTCATGGG | 200 |
| 21 | EVRRGDLHGT | 19 | GAAGTCAGAAGAGGAGACTTGCACGGGACA | 201 |
| 22 | SVSRGDVHTM | 20 | AGTGTCTCAAGAGGAGACGTGCACACGATG | 202 |
| 23 | MVTRGDLGTR | 21 | ATGGTGACTAGAGGAGACCTTGGTACGCGG | 203 |
| 24 | NGGRGDTTHF | 22 | AACGGCGGGAGAGGAGACACGACGCACTTC | 204 |
| 25 | TMGRGDMNSL | 23 | ACGATGGGGAGAGGAGACATGAATTCGCTT | 205 |
| 26 | AISRGDQGLS | 24 | GCGATTAGTAGAGGAGACCAGGGTCTTTCT | 206 |
| 27 | NDARGDKSTY | 25 | AACGACGCAAGAGGAGACAAATCCACATAC | 207 |
| 28 | VGLRGDLTGS | 26 | GTGGGGCTGAGAGGAGACTTGACGGGTTCG | 208 |
| 29 | EMRRGDLGTS | 27 | GAGATGAGGAGAGGAGACCTGGGGACGAGT | 209 |
| 30 | AMSRGDMGMA | 28 | GCGATGAGTAGAGGAGACATGGGGATGGCG | 210 |
| 31 | ATGRGDLGQA | 179 | GCAACGGGCAGAGGAGACTTAGGCCAAGCA | 211 |
| 32 | NVARGDQVNY | 29 | AACGTAGCAAGAGGAGACCAAGTTAACTAC | 212 |
| 33 | SIGRGDTGHM | 15 | AGCATCGGAAGAGGAGACACCGGCCACATG | 213 |
| 34 | ASVRGDLSGS | 30 | GCATCCGTAAGAGGAGACCTATCAGGCTCA | 214 |
| 35 | SAARGDTERL | 31 | AGCGCCGCGAGAGGAGACACTGAACGGCTA | 215 |
| 36 | AMSRGDMGMA | 28 | GCCATGTCAAGAGGAGACATGGGTATGGCT | 216 |
| 37 | SPSRGDQGRT | 9 | AGTCCATCGAGAGGAGACCAAGGACGCACT | 217 |
| 38 | VPGRGDLNTM | 32 | GTGCCTGGGAGAGGAGACCTTAATACTATG | 218 |
| 39 | GPGRGDQTTL | 178 | GGTCCTGGGAGAGGAGACCAAACGACCCTT | 219 |
| 40 | TSVRGDHGTL | 33 | ACATCGGTCAGAGGAGACCACGGAACATTG | 220 |
| 41 | TPSRGDLGQT | 34 | ACGCCTTCGAGAGGAGACCTTGGGCAGACT | 221 |
| 42 | AGHRGDTGVI | 35 | GCTGGACACAGAGGAGACACAGGAGTCATC | 222 |
| 43 | APARGDQGSM | 36 | GCGCCGGCGAGAGGAGACCAGGGTAGTATG | 223 |
| 44 | MSLRGDLNGS | 37 | ATGTCGTTGAGAGGAGACTTGAATGGGTCG | 224 |
| 45 | EAKRGDVHSI | 38 | GAGGCTAAGAGAGGAGACGTGCATTCTATT | 225 |
| 46 | SAQRGDVQAV | 39 | AGTGCTCAGAGAGGAGACGTGCAGGCGGTG | 226 |
| 47 | STARGDQGDR | 40 | AGTACGGCGAGAGGAGACCAGGGGGATAGG | 227 |
| 48 | QISRGDLGIN | 41 | CAGATTAGTAGAGGAGACCTGGGGATTAAT | 228 |
| 49 | TFTRGDMTMN | 42 | ACGTTCACAAGAGGAGACATGACGATGAAC | 229 |
| 50 | QEGRGDLNMR | 43 | CAAGAAGGAAGAGGAGACCTGAACATGAGG | 230 |
| 51 | AHARGDTSSL | 44 | GCACACGCAAGAGGAGACACCAGCTCCCTG | 231 |
| 52 | TNGRGDAGTL | 45 | ACGAATGGGAGAGGAGACGCTGGGACTCTG | 232 |
| 53 | AFGRGDQGQL | 46 | GCTTTCGGCAGAGGAGACCAAGGGCAACTA | 233 |
| 54 | ADGRGDRSSL | 47 | GCTGATGGGAGAGGAGACCGTTCGTCTCTG | 234 |
| 55 | DGRRGDGHSL | 48 | GACGGACGCAGAGGAGACGGACACAGCCTT | 235 |
| 56 | EKLRGDLHST | 49 | GAGAAGTTGAGAGGAGACCTTCATTCGACT | 236 |
| 57 | EARRGDASAM | 50 | GAGGCGCGTAGAGGAGACGCTTCGGCGATG | 237 |
| 58 | MGTRGDKMDF | 51 | ATGGGAACGAGAGGAGACAAAATGGACTTC | 238 |
| 59 | STSRGDRESY | 52 | TCGACTTCGAGAGGAGACCGGGAGTCGTAT | 239 |
| 60 | CQPRGDTTRC | 53 | TGTCAGCCGAGAGGAGACACGACTCGGTGT | 240 |
| 61 | MHTRGDKMDF | 54 | ATGCACACGAGAGGAGACAAAATGGACTTC | 241 |
| 62 | YSARGDTSGL | 55 | TACAGTGCCAGAGGAGACACAAGTGGCCTG | 242 |
| 63 | STMRGDHEKL | 56 | TCGACGATGAGAGGAGACCATGAGAAGTTG | 243 |
| 64 | TQMRGDGVTL | 57 | ACCCAAATGAGAGGAGACGGGGTCACACTA | 244 |
| 65 | TTRRGDMGDN | 58 | ACTACTCGTAGAGGAGACATGGGGGATAAT | 245 |
| 66 | ANGRGDRLEL | 59 | GCGAATGGTAGAGGAGACAGGCTGGAGTTG | 246 |
| 67 | AVSRGDRMEF | 8 | GCTGTGTCTAGAGGAGACAGGATGGAGTTT | 247 |
| 68 | ENQRGDLSGR | 60 | GAGAATCAGAGAGGAGACTTGTCGGGTCGG | 248 |
| 69 | STGRGDLGQA | 61 | TCGACTGGTAGAGGAGACCTGGGGCAGGCT | 249 |
| 70 | MHTRGDKMDF | 54 | ATGCATACTAGAGGAGACAAGATGGATTTT | 250 |
| 71 | SSARGDYSEV | 62 | AGTAGTGCGAGAGGAGACTATAGTGAGGTG | 251 |
| 72 | AFGRGDQGQL | 46 | GCGTTTGGGAGAGGAGACCAGGGTCAGCTT | 252 |
| 73 | STARGDAATY | 63 | AGTACGGCGAGAGGAGACGCGGCGACTTAT | 253 |
| 74 | VNTRGDTQKL | 64 | GTCAACACAAGAGGAGACACTCAAAAACTT | 254 |
| 75 | AMSRGDHASL | 65 | GCGATGAGTAGAGGAGACCATGCGTCGCTT | 255 |
| 76 | QAARGDVNKL | 66 | CAGGCTGCTAGAGGAGACGTTAATAAGCTG | 256 |
| 77 | RGTRGDTVEL | 67 | AGGGGTACGAGAGGAGACACGGTTGAGTTG | 257 |
| 78 | TTRRGDMGDN | 58 | ACCACCCGGAGAGGAGACATGGGAGACAAC | 258 |
| 79 | ASTRGDYAGV | 68 | GCTAGTACGAGAGGAGACTATGCGGGTGTT | 259 |
| 80 | DDRRGDKLPL | 69 | GACGACAGGAGAGGAGACAAACTGCCCCTT | 260 |
| 81 | SGSRGDLNAV | 70 | TCGGGGTCGAGAGGAGACCTGAATGCGGTG | 261 |
| 82 | EYRRGDQQIQ | 71 | GAGTATAGGAGAGGAGACCAGCAGATTCAG | 262 |
| 83 | TYVRGDRAEV | 72 | ACGTACGTCAGAGGAGACAGAGCAGAAGTG | 263 |
| 84 | QSLRGDLNGS | 73 | CAATCACTAAGAGGAGACTTGAACGGATCC | 264 |
| 85 | EGRRGDTTSL | 74 | GAGGGTCGGAGAGGAGACACGACGTCGTTG | 265 |
| 86 | AENRGDRSSL | 75 | GCGGAGAATAGAGGAGACCGGTCGAGTTTG | 266 |
| 87 | VAGRGDRSEL | 76 | GTGGCTGGGAGAGGAGACCGTAGTGAGCTG | 267 |
| 88 | DPARGDIGAR | 77 | GATCCGGCGAGAGGAGACATTGGTGCGCGT | 268 |
| 89 | EMRRGDLGTS | 27 | GAAATGCGCAGAGGAGACTTGGGAACTTCA | 269 |
| 90 | VWQRGDKMDM | 14 | GTTTGGCAGAGAGGAGACAAGATGGATATG | 270 |
| 91 | VIGRGDKALQ | 78 | GTGATTGGGAGAGGAGACAAGGCGCTTCAG | 271 |
| 92 | SFERGDKNSL | 79 | AGCTTCGAAAGAGGAGACAAAAACTCTCTT | 272 |
| 93 | QIARGDIASV | 80 | CAGATTGCTAGAGGAGACATTGCTAGTGTG | 273 |
| 94 | TISRGDLGGA | 81 | ACGATTAGTAGAGGAGACCTGGGTGGGGCT | 274 |
| 95 | AMIRGDMTHS | 82 | GCGATGATTAGAGGAGACATGACGCATAGT | 275 |
| 96 | TSVRGDHGTL | 33 | ACGAGTGTGAGAGGAGACCATGGGACGCTG | 276 |
| 97 | TMRRGDLNDS | 83 | ACGATGCGGAGAGGAGACCTGAATGATAGT | 277 |
| 98 | AYSRGDLGNH | 84 | GCCTACTCCAGAGGAGACCTAGGCAACCAC | 278 |
| 99 | EERRGDTHRL | 85 | GAGGAGCGGAGAGGAGACACTCATCGGCTG | 279 |
| 100 | SQLRGDAGTI | 86 | TCACAACTAAGAGGAGACGCGGGGACAATC | 280 |
| 101 | AMVRGDAHQL | 87 | GCGATGGTGAGAGGAGACGCGCATCAGCTG | 281 |
| 102 | TTSRGDLNSV | 88 | ACGACTAGTAGAGGAGACTTGAATTCGGTT | 282 |
| 103 | WEQRGDMIGK | 89 | TGGGAGCAGAGAGGAGACATGATTGGGAAG | 283 |
| 104 | YTTRGDLQSN | 90 | TACACCACCAGAGGAGACCTCCAATCAAAC | 284 |
| 105 | MSQRGDLSHQ | 91 | ATGTCGCAGAGAGGAGACCTTTCGCATCAG | 285 |
| 106 | ASTRGDTTHM | 92 | GCGAGTACTAGAGGAGACACGACGCATATG | 286 |
| 107 | SDTRGDTHRL | 93 | TCAGACACCAGAGGAGACACCCACAGACTG | 287 |
| 108 | TLGRGDQYTS | 94 | ACGCTGGGTAGAGGAGACCAGTATACGAGT | 288 |
| 109 | SYARGDVREV | 95 | TCGTATGCGAGAGGAGACGTTAGGGAGGTT | 289 |
| 110 | ETRRGDLSQN | 96 | GAGACTCGTAGAGGAGACCTGAGTCAGAAT | 290 |
| 111 | TIGRGDLMDK | 97 | ACAATCGGGAGAGGAGACCTGATGGACAAA | 291 |
| 112 | SYTRGDLSQN | 98 | AGTTACACCAGAGGAGACCTTAGCCAAAAC | 292 |
| 113 | SKLRGDASEI | 99 | TCGAAGCTGAGAGGAGACGCTAGTGAGATT | 293 |
| 114 | SMARGDKAEI | 100 | TCGATGGCGAGAGGAGACAAGGCGGAGATT | 294 |
| 115 | GAVRGDHSSL | 101 | GGAGCCGTCAGAGGAGACCACTCATCGTTA | 295 |
| 116 | METRGDMSNR | 102 | ATGGAGACGAGAGGAGACATGAGTAATCGT | 296 |
| 117 | AYTRGDKDAL | 103 | GCGTACACAAGAGGAGACAAAGACGCACTA | 297 |
| 118 | ENRRGDITQS | 104 | GAGAATCGGAGAGGAGACATTACGCAGTCG | 298 |
| 119 | STGRGDLGQA | 61 | TCCACGGGCAGAGGAGACCTTGGACAAGCA | 299 |
| 120 | GAVRGDHSSL | 101 | GGTGCTGTTAGAGGAGACCATAGTAGTCTT | 300 |
| 121 | SQLRGDAGTI | 86 | TCTCAGCTTAGAGGAGACGCTGGTACGATT | 301 |
| 122 | MLLRGDKNDF | 105 | ATGCTCCTAAGAGGAGACAAAAACGACTTC | 302 |
| 123 | KVQRGDASDW | 106 | AAGGTGCAGAGAGGAGACGCGAGTGATTGG | 303 |
| 124 | AFTRGDMQTA | 107 | GCGTTTACGAGAGGAGACATGCAGACTGCT | 304 |
| 125 | QPKRGDVQAQ | 108 | CAGCCTAAGAGAGGAGACGTTCAGGCTCAG | 305 |
| 126 | ASLRGDMGVS | 109 | GCTAGTCTGAGAGGAGACATGGGGGTGAGT | 306 |
| 127 | AYSRGDKESF | 110 | GCCTACTCCAGAGGAGACAAAGAATCGTTC | 307 |
| 128 | RFQRGDLTDA | 111 | CGGTTCCAAAGAGGAGACTTGACCGACGCT | 308 |
| 129 | SDARGDTMKL | 112 | TCTGATGCTAGAGGAGACACGATGAAGCTG | 309 |
| 130 | SGARGDTVSL | 113 | AGCGGGGCCAGAGGAGACACAGTAAGTCTC | 310 |
| 131 | DEKRGDQKHL | 114 | GATGAGAAGAGAGGAGACCAGAAGCATCTT | 311 |
| 132 | NGVRGDVQNF | 115 | AACGGAGTAAGAGGAGACGTCCAAAACTTC | 312 |
| 133 | MTLRGDLGGS | 116 | ATGACGTTGAGAGGAGACCTGGGTGGGTCG | 313 |
| 134 | EARRGDASAM | 50 | GAGGCTAGGAGAGGAGACGCTAGTGCGATG | 314 |
| 135 | GQERGDLGTR | 117 | GGGCAGGAGAGAGGAGACCTGGGGACTCGG | 315 |
| 136 | RGARGDLVDA | 118 | AGAGGCGCCAGAGGAGACCTAGTCGACGCT | 316 |
| 137 | QYSRGDHTDL | 119 | CAATACTCCAGAGGAGACCACACCGACCTT | 317 |
| 138 | MNTRGDVHAM | 120 | ATGAACACCAGAGGAGACGTGCACGCTATG | 318 |
| 139 | TVRRGDLATE | 121 | ACGGTACGGAGAGGAGACCTAGCAACCGAA | 319 |
| 140 | NIARGDAGQY | 16 | AATATTGCGAGAGGAGACGCTGGTCAGTAT | 320 |
| 141 | SVGRGDKADI | 122 | TCTGTTGGGAGAGGAGACAAGGCTGATATT | 321 |
| 142 | SHNRGDTGTM | 123 | TCACACAACAGAGGAGACACCGGAACCATG | 322 |
| 143 | TNTRGDKESV | 124 | ACGAACACCAGAGGAGACAAAGAATCAGTA | 323 |
| 144 | SIGRGDQYTI | 125 | TCGATTGGTAGAGGAGACCAGTATACGATT | 324 |
| 145 | QTSRGDAGSW | 126 | CAGACGAGTAGAGGAGACGCGGGGTCTTGG | 325 |
| 146 | AENRGDRSSL | 75 | GCTGAAAACAGAGGAGACCGAAGCAGCCTA | 326 |
| 147 | AISRGDVQSL | 127 | GCGATTTCGAGAGGAGACGTTCAGTCGTTG | 327 |
| 148 | NAQRGDHGQL | 128 | AACGCACAAAGAGGAGACCACGGGCAACTG | 328 |
| 149 | LNSRGDQASV | 129 | CTCAACTCGAGAGGAGACCAAGCCTCCGTC | 329 |
| 150 | SGNRGDIGTF | 130 | TCGGGAAACAGAGGAGACATAGGTACATTC | 330 |
| 151 | NVGRGDQATM | 131 | AACGTGGGAAGAGGAGACCAAGCCACAATG | 331 |
| 152 | SYSRGDTGRL | 132 | TCGTATTCTAGAGGAGACACTGGTCGGCTT | 332 |
| 153 | SHLRGDQALA | 133 | AGCCACTTAAGAGGAGACCAAGCGTTGGCC | 333 |
| 154 | YFARGDMTMN | 134 | TACTTCGCCAGAGGAGACATGACTATGAAC | 334 |
| 155 | QSQRGDLNPM | 135 | CAGTCGCAGAGAGGAGACCTTAATCCTATG | 335 |
| 156 | EQRRGDKTEL | 136 | GAGCAGAGGAGAGGAGACAAGACGGAGCTG | 336 |
| 157 | VSARGDAGQL | 137 | GTGTCTGCGAGAGGAGACGCGGGTCAGTTG | 337 |
| 158 | SPSRGDQGRT | 9 | TCTCCGTCTAGAGGAGACCAGGGGCGGACG | 338 |
| 159 | EASRGDKGTH | 138 | GAGGCTAGTAGAGGAGACAAGGGTACGCAT | 339 |
| 160 | LSTRGDMGMQ | 139 | CTGTCTACTAGAGGAGACATGGGTATGCAG | 340 |
| 161 | ANMRGDQLHT | 140 | GCGAATATGAGAGGAGACCAGCTGCATACT | 341 |
| 162 | ENTRGDLTHA | 141 | GAGAATACGAGAGGAGACCTTACTCATGCG | 342 |
| 163 | IERRGDSAGL | 142 | ATTGAGCGTAGAGGAGACTCGGCGGGGCTG | 343 |
| 164 | SAMRGDGVSL | 143 | AGTGCGATGAGAGGAGACGGAGTGAGCTTG | 344 |
| 165 | TVSRGDQGLS | 144 | ACGGTTTCGAGAGGAGACCAGGGGTTGTCT | 345 |
| 166 | SIVRGDLNST | 145 | TCGATCGTCAGAGGAGACCTGAACTCCACG | 346 |
| 167 | DVARGDKTNF | 146 | GACGTAGCGAGAGGAGACAAAACAAACTTC | 347 |
| 168 | WSQRGDLSGT | 147 | TGGAGCCAAAGAGGAGACCTGAGTGGAACC | 348 |
| 169 | LNQRGDVSNM | 148 | CTGAACCAAAGAGGAGACGTTTCCAACATG | 349 |
| 170 | AALRGDLSGS | 149 | GCCGCCCTAAGAGGAGACCTATCCGGCTCA | 350 |
| 171 | RVARGDITDI | 150 | AGGGTTGCGAGAGGAGACATTACGGATATT | 351 |
| 172 | STNRGDLNQV | 151 | TCGACGAACAGAGGAGACCTCAACCAAGTT | 352 |
| 173 | DSRRGDSVSL | 152 | GATTCGCGGAGAGGAGACTCTGTGAGTCTT | 353 |
| 174 | SVGRGDQSQM | 153 | AGTGTTGGGAGAGGAGACCAGTCTCAGATG | 354 |
| 175 | SNTRGDTNSL | 154 | TCCAACACGAGAGGAGACACAAACTCCCTA | 355 |
| 176 | DNRRGDGTTM | 155 | GATAATCGGAGAGGAGACGGTACGACTATG | 356 |
| 177 | TPSRGDQGRL | 156 | ACGCCTTCGAGAGGAGACCAAGGAAGACTA | 357 |
| 178 | NYSRGDSMTL | 157 | AACTACAGCAGAGGAGACTCAATGACGCTT | 358 |
| 179 | MQARGDAGTL | 158 | ATGCAGGCTAGAGGAGACGCTGGGACTCTG | 359 |
| 180 | TQSRGDLSGA | 159 | ACGCAGTCGAGAGGAGACTTGTCTGGTGCG | 360 |
| 181 | FAQRGDLTGV | 160 | TTTGCGCAGAGAGGAGACTTGACTGGGGTT | 361 |
| 182 | APVRGDLIGT | 161 | GCGCCGGTGAGAGGAGACCTGATTGGTACG | 362 |
| 183 | SNTRGDTNSL | 154 | TCGAATACTAGAGGAGACACGAATAGTTTG | 363 |
| 184 | EPKRGDLSNT | 162 | GAGCCGAAGAGAGGAGACTTGAGTAATACG | 364 |
| 185 | SVGRGDTYPL | 163 | TCGGTTGGGAGAGGAGACACTTATCCTCTG | 365 |
| 186 | QTARGDMTGH | 164 | CAAACAGCCAGAGGAGACATGACTGGCCAC | 366 |
| 187 | AGARGDLENR | 165 | GCTGGTGCGAGAGGAGACTTGGAGAATCGG | 367 |
| 188 | MSTRGDLNNV | 166 | ATGAGCACTAGAGGAGACCTAAACAACGTC | 368 |
| 189 | EKQRGDLNSM | 167 | GAAAAACAAAGAGGAGACCTCAACAGCATG | 369 |
| 190 | IKTRGDLGHE | 168 | ATTAAGACGAGAGGAGACCTTGGTCATGAG | 370 |
| 191 | IGRRGDMELS | 169 | ATTGGGAGGAGAGGAGACATGGAGTTGTCT | 371 |
| 192 | TTGRGDLKEV | 170 | ACTACGGGTAGAGGAGACTTGAAGGAGGTT | 372 |
| 193 | TDKRGDQNTV | 171 | ACGGATAAGAGAGGAGACCAGAATACTGTG | 373 |
| 194 | SNVRGDREAV | 172 | TCGAATGTTAGAGGAGACCGGGAGGCGGTT | 374 |
| 195 | SVGRGDQSQM | 153 | TCAGTCGGCAGAGGAGACCAAAGTCAAATG | 375 |
| 196 | YANRGDLSHQ | 173 | TACGCCAACAGAGGAGACCTGAGTCACCAA | 376 |
| 197 | QISRGDLGIN | 41 | CAAATATCGAGAGGAGACCTAGGTATCAAC | 377 |
| 198 | SMMRGDAGQL | 174 | TCGATGATGAGAGGAGACGCTGGGCAGTTG | 378 |
| 199 | EARRGDSQGL | 175 | GAGGCGCGGAGAGGAGACAGTCAGGGGCTG | 379 |
| 200 | MPTRGDQTKF | 176 | ATGCCCACAAGAGGAGACCAAACCAAATTC | 380 |

TABLE 2
Enhanced MyoAAV (eMyoAAV) Capsid Variants

| | | SEQ | | SEQ |
|---|---|---|---|---|
| | | ID | | ID |
| RANK | N-MER INSERT | NO.: | ENCODING SEQUENCE | NO.: |
| 1 | SNSRGDYNSL | 381 | TCAAACTCCAGAGGAGACTACAACTCCTTG | 557 |
| 2 | SSARGDRDYL | 397 | TCGTCGGCTAGAGGAGACCGTGATTATCTG | 558 |
| 3 | STVRGDYTSV | 398 | AGCACGGTCAGAGGAGACTACACGTCCGTG | 559 |
| 4 | QERRGDYTSM | 382 | CAGGAGCGGAGAGGAGACTATACGAGTATG | 560 |
| 5 | NGGRGDTTHF | 386 | AACGGCGGGAGAGGAGACACGACGCACTTC | 561 |
| 6 | ASTRGDHGVL | 383 | GCGAGTACTAGAGGAGACCATGGTGTGTTG | 562 |
| 7 | SYQRGDQHNM | 399 | TCGTACCAAAGAGGAGACCAACACAACATG | 563 |
| 8 | NDTRGDRSYM | 400 | AACGACACAAGAGGAGACCGATCTTACATG | 564 |
| 9 | ENRRGDFNNT | 384 | GAAAACAGGAGAGGAGACTTCAACAACACT | 565 |
| 10 | SGSRGDLSGH | 401 | TCCGGCTCGAGAGGAGACTTGTCAGGACAC | 566 |
| 11 | ENRRGDITQS | 393 | GAGAATCGGAGAGGAGACATTACGCAGTCG | 567 |
| 12 | DKPRGDRQLL | 402 | GATAAGCCGAGAGGAGACCGGCAGTTGTTG | 568 |
| 13 | EERRGDTHRL | 392 | GAGGAGCGGAGAGGAGACACTCATCGGCTG | 569 |
| 14 | AMIRGDMTHS | 391 | GCGATGATTAGAGGAGACATGACGCATAGT | 570 |
| 15 | SNNRGDYTTM | 403 | TCAAACAACAGAGGAGACTACACGACAATG | 571 |
| 16 | QGGRGDLSTL | 404 | CAGGGTGGGAGAGGAGACTTGTCGACGTTG | 572 |
| 17 | SKDRGDYQTL | 405 | TCGAAGGATAGAGGAGACTATCAGACTCTT | 573 |
| 18 | ATARGDQMKL | 406 | GCTACGGCGAGAGGAGACCAGATGAAGCTG | 574 |
| 19 | QHMRGDLTGA | 407 | CAGCATATGAGAGGAGACTTGACTGGTGCG | 575 |
| 20 | DGTRGDLGRY | 408 | GACGGCACGAGAGGAGACCTTGGAAGGTAC | 576 |
| 21 | DSRRGDYANL | 409 | GACTCTCGGAGAGGAGACTACGCAAACCTC | 577 |
| 22 | SAMRGDYTST | 410 | TCGGCGATGAGAGGAGACTATACTAGTACT | 578 |
| 23 | ENRRGDAQLL | 411 | GAGAATCGGAGAGGAGACGCGCAGCTGCTG | 579 |
| 24 | TTLRGDHSQL | 412 | ACGACGCTGAGAGGAGACCATAGTCAGCTT | 580 |
| 25 | DAGRGDMHRM | 413 | GACGCAGGGAGAGGAGACATGCACCGTATG | 581 |
| 26 | QHTRGDLSST | 414 | CAGCATACGAGAGGAGACTTGAGTTCTACT | 582 |
| 27 | QVYRGDRESV | 415 | CAAGTTTACAGAGGAGACAGGGAATCCGTG | 583 |
| 28 | SSQRGDLAGT | 416 | TCGAGTCAGAGAGGAGACTTGGCTGGTACT | 584 |
| 29 | TDVRGDRGTF | 417 | ACGGATGTTAGAGGAGACAGGGGGACGTTT | 585 |
| 30 | SSVRGDREVT | 418 | TCGTCTGTGAGAGGAGACCGGGAGGTGACG | 586 |
| 31 | ENRRGDLTNA | 419 | GAGAATAGGAGAGGAGACCTGACTAATGCG | 587 |
| 32 | SYARGDVHSI | 420 | TCGTATGCGAGAGGAGACGTTCATTCTATT | 588 |
| 33 | DSSRGDLNLR | 421 | GACAGCTCAAGAGGAGACCTCAACCTCCGG | 589 |
| 34 | SNARGDYSNM | 422 | TCGAACGCGAGAGGAGACTACTCAAACATG | 590 |
| 35 | SSVRGDHSVL | 423 | TCGTCTGTGAGAGGAGACCATTCGGTGCTT | 591 |
| 36 | SAFRGDLHAT | 424 | TCGGCTTTTAGAGGAGACCTGCATGCTACT | 592 |
| 37 | SAMRGDYTST | 410 | TCCGCCATGAGAGGAGACTACACAAGCACG | 593 |
| 38 | NAQRGDHGQL | 394 | AACGCACAAAGAGGAGACCACGGGCAACTG | 594 |
| 39 | SDRRGDQLLY | 425 | TCGGATCGGAGAGGAGACCAGCTGTTGTAT | 595 |
| 40 | SGVRGDRLAV | 426 | AGCGGCGTAAGAGGAGACCGCCTAGCCGTA | 596 |
| 41 | ASLRGDLSST | 427 | GCCAGCCTAAGAGGAGACCTCAGCTCAACG | 597 |
| 42 | TNGRGDLHGM | 428 | ACGAACGGAAGAGGAGACCTTCACGGAATG | 598 |
| 43 | TNTRGDHGML | 429 | ACGAATACGAGAGGAGACCATGGGATGCTG | 599 |
| 44 | SSARGDRDYL | 397 | AGTTCCGCCAGAGGAGACCGGGACTACCTC | 600 |
| 45 | EDRRGDLLRT | 430 | GAGGATCGGAGAGGAGACCTTTTGAGGACT | 601 |
| 46 | SSLRGDLLHS | 431 | TCGTCGCTGAGAGGAGACCTGTTGCATTCT | 602 |
| 47 | ENRRGDLTNA | 419 | GAAAACCGTAGAGGAGACCTCACGAACGCT | 603 |
| 48 | DGRRGDRESI | 432 | GACGGCAGGAGAGGAGACCGGGAATCGATC | 604 |
| 49 | TGTRGDTMTW | 433 | ACTGGAACCAGAGGAGACACAATGACATGG | 605 |
| 50 | STVRGDYTSV | 398 | TCGACTGTTAGAGGAGACTATACTTCTGTT | 606 |
| 51 | SATRGDHNVL | 434 | TCGGCAACGAGAGGAGACCACAACGTACTG | 607 |
| 52 | TDRRGDSGTL | 435 | ACGGATCGGAGAGGAGACAGTGGTACTCTG | 608 |
| 53 | TSARGDLIHT | 436 | ACGAGTGCTAGAGGAGACCTGATTCATACG | 609 |
| 54 | SGVRGDRLAV | 426 | AGTGGGGTGAGAGGAGACCGGCTGGCGGTG | 610 |
| 55 | AVERGDRLML | 437 | GCGGTTGAGAGAGGAGACCGTCTTATGCTG | 611 |
| 56 | DRSRGDTHVL | 438 | GACAGGTCGAGAGGAGACACGCACGTACTC | 612 |
| 57 | ESTRGDLRVV | 439 | GAGTCGACGAGAGGAGACCTTCGTGTTGTG | 613 |
| 58 | TTIRGDYREL | 440 | ACGACGATTAGAGGAGACTATCGTGAGTTG | 614 |
| 59 | TFIRGDLAGA | 441 | ACGTTCATCAGAGGAGACCTGGCAGGTGCG | 615 |
| 60 | MTSRGDLTTY | 442 | ATGACGAGCAGAGGAGACTTGACAACATAC | 616 |
| 61 | ADRRGDQLYS | 443 | GCGGATCGTAGAGGAGACCAGCTTTATTCG | 617 |
| 62 | AHMRGDLGGT | 385 | GCACACATGAGAGGAGACCTAGGCGGCACG | 618 |
| 63 | GYVRGDLGQH | 444 | GGGTACGTCAGAGGAGACCTGGGGCAACAC | 619 |
| 64 | DASRGDRTSL | 445 | GATGCGAGTAGAGGAGACAGGACTAGTTTG | 620 |
| 65 | TEVRGDRSQV | 446 | ACGGAGGTGAGAGGAGACAGGTCGCAGGTT | 621 |
| 66 | SHLRGDQALA | 395 | TCGCATCTGAGAGGAGACCAGGCTCTTGCG | 622 |
| 67 | SEVRGDRLSI | 447 | TCGGAGGTGAGAGGAGACCGGTTGAGTATT | 623 |
| 68 | SAARGDTERL | 387 | AGCGCCGCGAGAGGAGACACTGAACGGCTA | 624 |
| 69 | SDRRGDLSGA | 448 | TCAGACCGTAGAGGAGACCTGTCGGGCGCT | 625 |
| 70 | SVTRGDRVVI | 449 | AGCGTCACAAGAGGAGACAGAGTAGTCATC | 626 |
| 71 | SEGRGDRMAL | 450 | TCGGAGGGGAGAGGAGACAGGATGGCTCTT | 627 |
| 72 | SSTRGDHLSL | 451 | TCGTCTACTAGAGGAGACCATCTTTCGCTG | 628 |
| 73 | AMIRGDMTHS | 391 | GCTATGATCAGAGGAGACATGACCCACTCC | 629 |
| 74 | SSTRGDQIYV | 452 | TCGTCGACGAGAGGAGACCAGATTTATGTG | 630 |
| 75 | EERRGDTHRL | 392 | GAGGAGCGGAGAGGAGACACTCATCGGTTG | 631 |
| 76 | SNSRGDYNSL | 381 | TCGAATTCGAGAGGAGACTATAATAGTCTT | 632 |
| 77 | SAQRDRMGSP | 453 | TCCGCACAAAGGGATCGTATGGGTTCTCCG | 633 |
| 78 | TGTRGDIATF | 454 | ACGGGTACGAGAGGAGACATTGCGACTTTT | 634 |
| 79 | SMQRGDLLST | 455 | TCGATGCAGAGAGGAGACCTGCTTTCTACT | 635 |
| 80 | EDVRGDRSKL | 456 | GAGGATGTGAGAGGAGACAGGAGTAAGCTT | 636 |
| 81 | AHMRGDLGGT | 385 | GCGCATATGAGAGGAGACTTGGGGGGGACT | 637 |
| 82 | TSVRGDQSQY | 457 | ACGAGTGTGAGAGGAGACCAGAGTCAGTAT | 638 |
| 83 | ADRRGDTGLF | 458 | GCGGATCGGAGAGGAGACACGGGGTTGTTT | 639 |
| 84 | NTYRGDRDSL | 459 | AACACTTACAGAGGAGACCGAGACAGCCTG | 640 |
| 85 | TDVRGDRGTF | 417 | ACGGATGTTAGAGGAGACCGGGGGACGTTT | 641 |

| | | | | |
|---|---|---|---|---|
| 86 | SRGRGDLNDL | 460 | TCTCGTGGGAGAGGAGACCTGAATGATTTG | 642 |
| 87 | SNVRGDREAV | 396 | AGCAACGTAAGAGGAGACAGGGAAGCCGTC | 643 |
| 88 | MDRRGDASIL | 461 | ATGGACAGGAGAGGAGACGCCTCCATACTG | 644 |
| 89 | SIWRGDRTEV | 462 | TCGATATGGAGAGGAGACCGTACAGAAGTC | 645 |
| 90 | NSQRGDYSGM | 463 | AACTCACAAAGAGGAGACTACAGTGGAATG | 646 |
| 91 | SSVRGDIGGI | 464 | TCTAGCGTAAGAGGAGACATCGGGGGGATC | 647 |
| 92 | ENQRGDLSGR | 390 | GAGAATCAGAGAGGAGACTTGTCGGGTCGG | 648 |
| 93 | EIRRGDLLAQ | 465 | GAGATTCGGAGAGGAGACCTTCTGGCTCAG | 649 |
| 94 | SNIRGDHAVM | 466 | TCGAACATCAGAGGAGACCACGCAGTCATG | 650 |
| 95 | LDTRGDRSQV | 467 | CTGGATACGAGAGGAGACCGGAGTCAGGTT | 651 |
| 96 | ANTRGDHQNF | 468 | GCGAATACGAGAGGAGACCATCAGAATTTT | 652 |
| 97 | QVYRGDRESV | 415 | CAGGTGTATAGAGGAGACCGTGAGTCTGTT | 653 |
| 98 | TSVRGDLSMN | 469 | ACGTCGGTGAGAGGAGACCTTTCGATGAAT | 654 |
| 99 | ASTRGDHGVL | 383 | GCCTCAACGAGAGGAGACCACGGAGTTCTC | 655 |
| 100 | TTTRGDYLNT | 470 | ACGACGACGAGAGGAGACTATCTTAATACG | 656 |
| 101 | AERRGDIKEY | 471 | GCGGAGAGGAGAGGAGACATTAAGGAGTAT | 657 |
| 102 | SHARGDLGST | 472 | TCGCATGCTAGAGGAGACTTGGGTTCGACT | 658 |
| 103 | TSQRGDYVSL | 473 | ACGTCTCAGAGAGGAGACTATGTTTCTCTT | 659 |
| 104 | GPGRGDQTTL | 556 | GGGCCGGGTAGAGGAGACCAGACTACGTTG | 660 |
| 105 | VNVRGDRGEV | 474 | GTGAATGTGAGAGGAGACCGTGGTGAGGTG | 661 |
| 106 | SYRRGDHDQL | 475 | TCGTATCGTAGAGGAGACCATGATCAGCTT | 662 |
| 107 | SGTRGDRVDL | 476 | AGCGGCACAAGAGGAGACAGGGTAGACCTC | 663 |
| 108 | SHFRGDLHTS | 477 | TCCCACTTCAGAGGAGACTTGCACACGTCC | 664 |
| 109 | SDRRGDLSVP | 478 | TCGGATCGTAGAGGAGACCTTTCGGTGCCT | 665 |
| 110 | SGTRGDTLIL | 479 | AGCGGCACCAGAGGAGACACCCTTATACTC | 666 |
| 111 | ENTRGDLHGK | 480 | GAAAACACCAGAGGAGACCTCCACGGCAAA | 667 |
| 112 | DRARGDTHVL | 481 | GATCGGGCGAGAGGAGACACGCATGTGCTG | 668 |
| 113 | ASGRGDIAGL | 482 | GCGTCTGGTAGAGGAGACATTGCGGGGCTT | 669 |
| 114 | EGRRGDLFQA | 483 | GAGGGTCGTAGAGGAGACCTGTTTCAGGCG | 670 |
| 115 | RSERGDRLEI | 484 | AGATCCGAAAGAGGAGACAGGCTAGAAATC | 671 |
| 116 | AAYRGDAHVL | 485 | GCGGCCTACAGAGGAGACGCACACGTGCTC | 672 |
| 117 | NDSRGDQHRL | 486 | AACGACTCGAGAGGAGACCAACACCGATTG | 673 |
| 118 | SSARGDHSQL | 487 | TCATCGGCAAGAGGAGACCACTCTCAACTG | 674 |
| 119 | TNERGDRLSI | 488 | ACGAATGAGAGAGGAGACCGTCTTTCGATT | 675 |
| 120 | SNSRGDYTSV | 489 | AGCAACTCCAGAGGAGACTACACCAGTGTC | 676 |
| 121 | NVTRGDHTVM | 490 | AACGTCACAAGAGGAGACCACACCGTTATG | 677 |
| 122 | TMVRGDVKGL | 491 | ACGATGGTGAGAGGAGACGTTAAGGGGCTT | 678 |
| 123 | TGTRGDIATF | 454 | ACCGGGACAAGAGGAGACATAGCCACGTTC | 679 |
| 124 | VQLRGDLAST | 492 | GTGCAGCTGAGAGGAGACTTGGCTTCTACT | 680 |
| 125 | MNRRGDYSEQ | 493 | ATGAACCGGAGAGGAGACTACTCGGAACAA | 681 |
| 126 | ANTRGDLSPV | 494 | GCGAATACTAGAGGAGACCTGAGTCCGGTT | 682 |
| 127 | TGMRGDAGSL | 495 | ACGGGTATGAGAGGAGACGCTGGGAGTCTT | 683 |
| 128 | LDRRGDESSA | 496 | CTAGACCGCAGAGGAGACTTCAGCTCCGCG | 684 |
| 129 | MYHRGDMTSV | 497 | ATGTACCACAGAGGAGACATGACTTCGGTG | 685 |
| 130 | GSMRGDLHST | 498 | GGGTCGATGAGAGGAGACTTGCATTCGACG | 686 |
| 131 | SSSRGDFSSV | 499 | TCGTCGTCCAGAGGAGACTTCAGCTCTGTT | 687 |
| 132 | TGTRGDLHTY | 500 | ACGGGTACGAGAGGAGACTTGCATACTTAT | 688 |
| 133 | YTQRGDLATV | 501 | TACACCCAAAGAGGAGACCTTGCCACCGTC | 689 |
| 134 | TDVRGDRMYV | 502 | ACGGATGTTAGAGGAGACCGGATGTATGTG | 690 |
| 135 | TSVRGDHGTL | 388 | ACATCGGTCAGAGGAGACCACGGAACATTG | 691 |
| 136 | SNSRGDLSVN | 503 | TCGAACTCCAGAGGAGACCTATCGGTAAAC | 692 |
| 137 | QSGRGDQMTL | 504 | CAGTCTGGGAGAGGAGACCAGATGACGTTG | 693 |
| 138 | MNTRGDLQQS | 505 | ATGAACACCAGAGGAGACTTGCAACAATCG | 694 |
| 139 | AGSRGDLQTV | 506 | GCGGGATCAAGAGGAGACCTACAAACGGTG | 695 |
| 140 | SNMRGDQTYV | 507 | TCGAACATGAGAGGAGACCAAACTTACGTC | 696 |
| 141 | TPSRGDMSNV | 508 | ACGCCAAGTAGAGGAGACATGTCCAACGTC | 697 |
| 142 | NSTRGDLHMA | 509 | AACAGCACAAGAGGAGACCTACACATGGCA | 698 |
| 143 | ANTRGDLSVS | 510 | GCTAACACCAGAGGAGACCTCTCAGTCAGT | 699 |
| 144 | TDRRGDTGLL | 511 | ACCGACCGAAGAGGAGACACCGGCTTACTG | 700 |
| 145 | DGVRGDRATW | 512 | GACGGCGTAAGAGGAGACCGTGCAACATGG | 701 |
| 146 | ENRRGDFNNT | 384 | GAGAATCGTAGAGGAGACTTTAATAATACG | 702 |
| 147 | EPSRGDRMVL | 513 | GAGCCTAGTAGAGGAGACAGGATGGTGTTG | 703 |
| 148 | SGVRGDRIII | 514 | AGCGGCGTTAGAGGAGACCGGATCATAATC | 704 |
| 149 | TSMRGDYTHV | 515 | ACGTCGATGAGAGGAGACTATACGCATGTT | 705 |
| 150 | ASSRGDLTVI | 516 | GCGTCGAGTAGAGGAGACTTGACTGTTATT | 706 |
| 151 | ETRRGDLSLQ | 517 | GAGACGCGTAGAGGAGACCTGTCGCTTCAG | 707 |
| 152 | NNARGDQSMH | 518 | AACAACGCAAGAGGAGACCAATCAATGCAC | 708 |
| 153 | TDRRGDSSAL | 519 | ACGGATAGGAGAGGAGACTCTAGTGCGCTT | 709 |
| 154 | SSQRGDLTGV | 520 | TCAAGCCAAAGAGGAGACTTGACAGGTGTG | 710 |
| 155 | QTARGDVMVH | 521 | CAGACGGCTAGAGGAGACGTTATGGTTCAT | 711 |
| 156 | VSQRGDLNAV | 522 | GTGTCGCAGAGAGGAGACCTGAATGCTGTT | 712 |
| 157 | TMTRGDLAAN | 523 | ACGATGACCAGAGGAGACCTCGCTGCTAAC | 713 |
| 158 | NASRGDHSSL | 524 | AATGCTTCGAGAGGAGACCATTCGTCGTTG | 714 |
| 159 | SNTRGDMGLT | 525 | TCAAACACCAGAGGAGACATGGGCCTCACG | 715 |
| 160 | MYSRGDTHSL | 526 | ATGTATTCGAGAGGAGACACTCATAGTCTG | 716 |
| 161 | ADQRGDRAPL | 527 | GCGGATCAGAGAGGAGACAGGGCTCCGCTT | 717 |
| 162 | QERRGDYTSM | 382 | CAAGAAAGGAGAGGAGACTACACCTCTATG | 718 |
| 163 | SQNRGDLANT | 528 | TCCCAAAACAGAGGAGACCTAGCCAACACG | 719 |
| 164 | EKLRGDLHST | 389 | GAGAAGTTGAGAGGAGACCTTCATTCGACT | 720 |
| 165 | QGGRGDLSTL | 404 | CAAGGCGGAAGAGGAGACCTGAGTACACTG | 721 |
| 166 | SNRRGDTEMQ | 529 | TCGAATAGGAGAGGAGACACTGAGATGCAG | 722 |
| 167 | SGSRGDVSAL | 530 | TCGGGTAGTAGAGGAGACGTGAGTGCTTTG | 723 |
| 168 | ESTRGDRGTL | 531 | GAGTCGACGAGAGGAGACCGTGGTACGCTG | 724 |
| 169 | SAVRGDAALH | 532 | TCGGCGGTGAGAGGAGACGCGGCGCTTCAT | 725 |
| 170 | LSSRGDVNRL | 533 | CTGAGCAGCAGAGGAGACGTTAACCGCCTT | 726 |
| 171 | EQRRGDIQTI | 534 | GAGCAGAGGAGAGGAGACATTCAGACTATT | 727 |
| 172 | AAYRGDAHVL | 485 | GCTGCGTATAGAGGAGACGCGCATGTTCTT | 728 |
| 173 | SPVRGDHGAL | 535 | TCGCCGGTGAGAGGAGACCATGGGGCTTTG | 729 |
| 174 | DSRRGDYANL | 409 | GATTCGAGGAGAGGAGACTATGCGAATCTG | 730 |
| 175 | LSRRGDYQEL | 536 | TTGAGTCGGAGAGGAGACTATCAGGAGTTG | 731 |
| 176 | SYARGDVHSI | 420 | TCCTACGCAAGAGGAGACGTCCACTCCATC | 732 |
| 177 | DSRRGDASYH | 537 | GACTCACGCAGAGGAGACGCGTCGTACCAC | 733 |
| 178 | NHQRGDLSSS | 538 | AACCACCAAAGAGGAGACCTGAGCTCGAGT | 734 |
| 179 | SSTRGDHLSL | 451 | TCCTCAACGAGAGGAGACCACCTGTCTTTG | 735 |
| 180 | SWNRGDISGL | 539 | TCGTGGAACAGAGGAGACATATCTGGCCTT | 736 |
| 181 | TGTRGDLGTM | 540 | ACGGGTACTAGAGGAGACCTGGGGACGATG | 737 |
| 182 | QQLRGDTHTL | 541 | CAGCAGCTTAGAGGAGACACGCATACTCTT | 738 |
| 183 | AGLRGDRDSL | 542 | GCGGGGTTGAGAGGAGACCGTGATTCGCTT | 739 |
| 184 | QVYRGDRDQL | 543 | CAGGTTTATAGAGGAGACCGGGATCAGTTG | 740 |
| 185 | AGVRGDRVTI | 544 | GCAGGAGTAAGAGGAGACAGAGTGACCATC | 741 |
| 186 | NSARGDLLHS | 545 | AACTCAGCCAGAGGAGACCTTCTGCACTCC | 742 |
| 187 | NHSRGDLTGV | 546 | AACCACAGTAGAGGAGACCTGACAGGCGTT | 743 |
| 188 | NAYRGDTSAF | 547 | AACGCTTACAGAGGAGACACATCCGCGTTC | 744 |
| 189 | SANRGDIMHT | 548 | TCGGCTAACAGAGGAGACATAATGCACACG | 745 |
| 190 | QSARGDLVSY | 549 | CAATCCGCCAGAGGAGACCTCGTCAGTTAC | 746 |
| 191 | DSRRGDASYH | 537 | GATAGTAGGAGAGGAGACGCTAGTTATCAT | 747 |
| 192 | SFVRGDVRTL | 550 | TCGTTTGTGAGAGGAGACGTTCGTACGCTG | 748 |
| 193 | SDMRGDRSVY | 551 | AGCGACATGAGAGGAGACCGATCTGTGTAC | 749 |
| 194 | SGIRGDRYPI | 552 | TCCGGAATCAGAGGAGACCGCTACCCAATA | 750 |
| 195 | SNVRGDMAHS | 553 | TCCAACGTCAGAGGAGACATGGCTCACAGC | 751 |
| 196 | TEVRGDRSQV | 446 | ACTGAGGTTAGAGGAGACCGTTCGCAGGTT | 752 |
| 197 | ASSRGDLQQT | 554 | GCGAGCAGCAGAGGAGACCTGCAACAAACG | 753 |
| 198 | QSARGDLVSY | 549 | CAGTCTGCTAGAGGAGACCTTGTGTCTTAT | 754 |
| 199 | DASRGDRTSL | 445 | GACGCATCTAGAGGAGACCGAACATCCCTC | 755 |
| 200 | NSVRGDLNQT | 555 | AACAGTGTCAGAGGAGACCTCAACCAAACT | 756 |

TABLE 3
Top Ranking Skeletal Muscle Specific
n-mer inserts and/or RGD Motifs

| Variant | SEQ ID NO.: |
|---|---|
| TTGRGDQARL | 757 |
| TTLRGDHSQL | 758 |
| TNLRGDYQLT | 759 |
| STSRGDYVTH | 760 |
| MPARGDLVQT | 761 |
| SGVRGDRLAV | 762 |
| SNERGDQHRL | 763 |
| STLRGDYAVS | 764 |
| SNARGDIMTT | 765 |
| EASRGDLQMR | 766 |
| TYARGDLSGH | 767 |
| DSSRGDRSSV | 768 |
| SQSRGDLVPL | 769 |
| SATRGDYSIL | 770 |
| QATRGDLQHT | 771 |
| HDDRGDRRML | 772 |
| SSHRGDLLAT | 773 |
| SYQRGDQHNM | 774 |
| SHQRGDYNTL | 775 |
| MDQRGDMSVV | 776 |
| QIARGDLHVP | 777 |
| TYTRGDQHMM | 778 |
| DASRGDRTSL | 779 |
| SDRRGDLHPQ | 780 |
| SATRGDHSTL | 781 |
| AYQRGDFTSV | 782 |
| TGNRGDLQSV | 783 |
| AWRRGDLENA | 784 |
| NAARGDHGLL | 785 |
| SYSRGDHQAL | 786 |
| DGVRGDRTVV | 787 |
| SSERGDKMST | 788 |
| TSMRGDYTHV | 789 |
| SGVRGDRIII | 790 |
| ENRRGDAQLL | 791 |
| TVYRGDREQH | 792 |
| LDRRGDLLNS | 793 |
| ESVRGDLRST | 794 |
| DKYRGDQRGL | 795 |
| TDRRGDAHIL | 796 |
| SQTRGDTSLM | 797 |
| DATRGDTRML | 798 |
| SMQRGDLTHA | 799 |
| SGTRGDTLIL | 800 |
| ANTRGDHQNF | 801 |
| TSQRGDHTQL | 802 |
| SHWRGDTSSL | 803 |
| ISGRGDRQEL | 804 |
| SVLRGDIGTI | 805 |
| QDSRGDLSGK | 806 |
| KPIRGDGAEL | 807 |
| TYMRGDLQHT | 808 |
| TELRGDLSST | 809 |
| SAMRGDHAVL | 810 |
| SWVRGDASTL | 811 |
| QYARGDPHAL | 812 |
| STNRGDIVVH | 813 |
| VNIRGDLHQT | 814 |
| REYRGDSSIL | 815 |
| STLRGDGSMM | 816 |
| SSQRGDITAH | 817 |
| TEFRGDRSTV | 818 |
| TSTRGDYVTV | 819 |
| NHLRGDVSAI | 820 |
| LERRGDLVST | 821 |
| NEYRGDHSHP | 822 |
| NWQRGDTSTL | 823 |
| TDSRGDRTVL | 824 |
| YAVRGDQHTI | 825 |
| FGVRGDTRDL | 826 |
| SSARGDTGML | 827 |
| SAMRGDQMGQ | 828 |
| SHTRGDLVTT | 829 |
| VTTRGDTAIL | 830 |
| EPTRGDRHSI | 831 |
| GSQRGDRLVL | 832 |
| QHYRGDLSTT | 833 |
| METRGDRQQL | 834 |
| EALRGDKVVL | 835 |
| NAVRGDQSYV | 836 |
| SPLRGDNRAL | 837 |
| ENRRGDTHAL | 838 |
| NSQRGDLTGT | 839 |
| QYAPSQGTV | 840 |
| DNSRGDHSRL | 841 |
| NTHRGDYASI | 842 |
| HTTRGDQQPL | 843 |
| EWRRGDQTAL | 844 |
| TAVRGDQTTV | 845 |
| EYLRGDRISQ | 846 |
| SRYRGDQETI | 847 |
| ASLRGDTVTL | 848 |
| VGVRGDSHVL | 849 |
| TNSRGDHTSL | 850 |
| VDQRGDQRAL | 851 |
| ASVRGDRLDV | 852 |
| TSYRGDLSSN | 853 |
| TSDRGDSSNR | 854 |
| SYMRGDLDMR | 855 |
| TDVRGDRSMI | 856 |
| SYVRGDSSTV | 857 |
| QVYRGDRESV | 858 |
| TDRRGDAVSF | 859 |
| TNSRGDLHTT | 860 |
| EAIRGDFKTL | 861 |
| TGIRGDTAGL | 862 |
| TSSRGDVQSL | 863 |
| SSRRGDTNEL | 864 |
| SNARGDHTPL | 865 |
| SELRGDRSPY | 866 |
| VHARGDTSIM | 867 |
| SALRGDHGTL | 868 |
| QTGRGDIAGM | 869 |
| TVARGDQIRL | 870 |
| TNSRGDSVAL | 871 |
| QNARGDSAVI | 872 |
| HYLRGDTTTL | 873 |
| ANARGDLQNT | 874 |
| QNIRGDIRTV | 875 |
| AALRGDHGQM | 876 |
| TTDRGDLSAR | 877 |
| LNVRGDLVHT | 878 |
| YSTRGDHTVL | 879 |
| TNARGDLTVS | 880 |
| TNARGDYTAL | 881 |
| AEGRGDTRGS | 882 |
| TNIRGDQSSV | 883 |
| VDRRGDTMTM | 884 |
| QIGRGDVTPL | 885 |
| MQARGDLLGV | 886 |
| NTQRGDYASV | 887 |
| SDTRGDRITQ | 888 |
| SAIRGDYRDV | 889 |
| VGVRGDVHPL | 890 |
| TVLRGDAERL | 891 |
| ASTRGDLSGQ | 892 |
| DSRRGDGQNL | 893 |
| IDKRGDIQGL | 894 |
| TVTRGDLLVN | 895 |
| DSTRGDRLGL | 896 |
| AANRGDYASL | 897 |
| RDYRGDTSSL | 898 |
| SNIRGDASLH | 899 |
| NLQRGDRTDF | 900 |
| NASRGDHSSM | 901 |
| TSMRGDYTHV | 902 |
| TSRRGDLNDV | 903 |
| QSHRGDVQSL | 904 |
| STTRGDYQSV | 905 |
| YSTRGDHAML | 906 |
| TSARGDLIHT | 907 |
| ATARGDRESF | 908 |
| ASTRGDYSTM | 909 |
| SNNRGDVQRL | 910 |
| ERLRGDQHII | 911 |
| SSIRGDHATL | 912 |
| NPTRGDIATV | 913 |
| MSTRGDLSVN | 914 |
| MDRRGDITYA | 915 |
| NATRGDLMSA | 916 |
| SDHRGDRTYQ | 917 |
| NWVRGDLSTA | 918 |
| SSHRGDLSAT | 919 |
| NATRGDYREI | 920 |
| DTLRGDLQTA | 921 |
| IAVRGDLTPV | 922 |
| TLLRGDLAHS | 923 |
| MNTRGDHTVL | 924 |
| TGHRGDIAVY | 925 |
| TSNRGDQMSN | 926 |
| SATRGDHTAI | 927 |
| SSVRGDREHA | 928 |
| TNSRGDLVVH | 929 |
| ETRRGDLSSQ | 930 |
| TYARGDITLT | 931 |
| SASRGDTLHL | 932 |
| DNQRGDLSSR | 933 |
| TQSRGDLRDA | 934 |
| ENRRGDLTNA | 935 |
| TSIRGDISSV | 936 |
| ISARGDTMTL | 937 |
| SRVRGDQDHW | 938 |
| SGNRGDIASY | 939 |
| NEQRGDRYNH | 940 |
| EALRGDVRAL | 941 |
| VDRRGDYTQM | 942 |
| NNVRGDYTSV | 943 |
| QTYRGDASVL | 944 |
| SNYRGDHGSL | 945 |
| TSSRGDLREV | 946 |
| QYTRGDVSNL | 947 |
| SDLRGDVRER | 948 |
| QNARGDTTAL | 949 |
| NSLRGDRDTM | 950 |
| SNSRGDQAQV | 951 |
| EATRGDRSTL | 952 |
| VPQRGDITNL | 953 |
| DKIRGDLRSI | 954 |
| SAARGDYSIV | 955 |
| VGLRGDLIGQ | 956 |
| QAGRGDLTVI | 957 |
| SKTRGDFQEA | 958 |
| GTARGDYSML | 959 |
| ISTRGDLVTI | 960 |
| TGTRGDREYM | 961 |
| MTTRGDLSIT | 962 |
| STSRGDMTSV | 963 |
| GPARGDFTSS | 964 |
| VDRRGDLGHV | 965 |
| NSGRGDMSQL | 966 |
| SQGRGDLERY | 967 |
| VFGRGDQYTL | 968 |
| IVGRGDLHLQ | 969 |
| SYSRGDTSRL | 970 |
| MSSRGDRATI | 971 |
| MSSRGDLTRV | 972 |
| QHTRGDFGNL | 973 |
| ETRRGDLSSQ | 974 |
| TGTRGDLRAI | 975 |
| QMARGDLSTA | 976 |
| LVERGDRIMN | 977 |
| GLVRGDLNAR | 978 |
| NNPRGDLSSV | 979 |
| HEKRGDLSNS | 980 |
| SQARGDLHQT | 981 |
| FTGRGDLRTA | 982 |
| QSIRGDTGHL | 983 |
| SAGRGDMSVL | 984 |
| SERRGDEHKW | 985 |
| TTGRGDLVSL | 986 |
| LGLRGDQIGQ | 987 |
| VALRGDLTHQ | 988 |
| MIGRGDQAPL | 989 |
| FQARGDHSTL | 990 |
| NSVRGDHSSL | 991 |
| WPNRGDLQST | 992 |
| SASRGDYQTL | 993 |
| TMQRGDLHTI | 994 |
| TALRGDLAGT | 995 |
| VNARGDFSQT | 996 |
| GWIRGDRTSM | 997 |
| TFSRGDHTVL | 998 |
| SGARGDLVGV | 999 |
| NNVRGDYTSV | 1000 |
| QTARGDHVVL | 1001 |
| TLIRGDLTRS | 1002 |
| VTTRGDRLEL | 1003 |

TABLE 4
Top Ranking Skeletal Muscle
Specific n-mer inserts and/or RGD Motifs

| Variant | SEQ ID NO.: |
|---|---|
| EASRGDLQMR | 1004 |
| TYARGDLSGH | 1005 |
| DSSRGDRSSV | 1006 |
| SQSRGDLVPL | 1007 |
| MPARGDLVQT | 1008 |
| SGVRGDRLAV | 1009 |
| SNERGDQHRL | 1010 |
| STLRGDYAVS | 1011 |
| SNARGDIMTT | 1012 |
| TTGRGDQARL | 1013 |
| TTLRGDHSQL | 1014 |
| TNLRGDYQLT | 1015 |
| STSRGDYVTH | 1016 |
| SATRGDYSIL | 1017 |
| QATRGDLQHT | 1018 |
| HDDRGDRRML | 1019 |
| SSHRGDLLAT | 1020 |
| SYQRGDQHNM | 1021 |
| SHQRGDYNTL | 1022 |
| MDQRGDMSVV | 1023 |
| QIARGDLHVP | 1024 |
| TYTRGDQHMM | 1025 |
| DASRGDRTSL | 1026 |
| SDRRGDLHPQ | 1027 |
| SATRGDHSTL | 1028 |
| AYQRGDFTSV | 1029 |
| TGNRGDLQSV | 1030 |
| AWRRGDLENA | 1031 |
| NAARGDHGLL | 1032 |
| SYSRGDHQAL | 1033 |
| DGVRGDRTVV | 1034 |
| SSERGDKMST | 1035 |
| TSMRGDYTHV | 1036 |
| SGVRGDRIII | 1037 |
| ENRRGDAQLL | 1038 |
| TVYRGDREQH | 1039 |
| LDRRGDLLNS | 1040 |
| ESVRGDLRST | 1041 |
| DKYRGDQRGL | 1042 |
| TDRRGDAHIL | 1043 |
| SQTRGDTSLM | 1044 |
| DATRGDTRML | 1045 |
| SMQRGDLTHA | 1046 |
| SGTRGDTLIL | 1047 |
| ANTRGDHQNF | 1048 |
| TSQRGDHTQL | 1049 |
| SHWRGDTSSL | 1050 |
| ISGRGDRQEL | 1051 |
| SVLRGDIGTI | 1052 |
| QDSRGDLSGK | 1053 |
| KPIRGDGAEL | 1054 |
| TYMRGDLQHT | 1055 |
| TELRGDLSST | 1056 |
| SAMRGDHAVL | 1057 |
| SWVRGDASTL | 1058 |
| QYARGDPHAL | 1059 |
| STNRGDIVVH | 1060 |
| VNIRGDLHQT | 1061 |
| REYRGDSSIL | 1062 |
| STLRGDGSMM | 1063 |
| SSQRGDITAH | 1064 |
| TEFRGDRSTV | 1065 |
| TSTRGDYVTV | 1066 |
| NHLRGDVSAI | 1067 |
| LERRGDLVST | 1068 |
| NEYRGDHSHP | 1069 |
| NWQRGDTSTL | 1070 |
| TDSRGDRTVL | 1071 |
| YAVRGDQHTI | 1072 |
| FGVRGDTRDL | 1073 |
| SSARGDTGML | 1074 |
| SAMRGDQMGQ | 1075 |
| SHTRGDLVTT | 1076 |
| VTTRGDTAIL | 1077 |
| EPTRGDRHSI | 1078 |
| GSQRGDRLVL | 1079 |
| QHYRGDLSTT | 1080 |
| METRGDRQQL | 1081 |
| EALRGDKVVL | 1082 |
| NAVRGDQSYV | 1083 |
| SPLRGDNRAL | 1084 |
| ENRRGDTHAL | 1085 |
| NSQRGDLTGT | 1086 |
| DNSRGDHSRL | 1087 |
| NTHRGDYASI | 1088 |
| HTTRGDQQPL | 1089 |
| EWRRGDQTAL | 1090 |
| TAVRGDQTTV | 1091 |
| EYLRGDRISQ | 1092 |
| SRYRGDQETI | 1093 |
| ASLRGDTVTL | 1094 |
| VGVRGDSHVL | 1095 |
| TNSRGDHTSL | 1096 |
| VDQRGDQRAL | 1097 |
| ASVRGDRLDV | 1098 |
| TSYRGDLSSN | 1099 |
| TSDRGDSSNR | 1100 |
| SYMRGDLDMR | 1101 |
| TDVRGDRSMI | 1102 |
| SYVRGDSSTV | 1103 |
| QVYRGDRESV | 1104 |
| TDRRGDAVSF | 1105 |
| TNSRGDLHTT | 1106 |
| EAIRGDFKTL | 1107 |
| TGIRGDTAGL | 1108 |
| TSSRGDVQSL | 1109 |
| SSRRGDTNEL | 1110 |
| SNARGDHTPL | 1111 |
| SELRGDRSPY | 1112 |
| VHARGDTSIM | 1113 |
| SALRGDHGTL | 1114 |
| QTGRGDIAGM | 1115 |
| TVARGDQIRL | 1116 |
| TNSRGDSVAL | 1117 |
| QNARGDSAVI | 1118 |
| HYLRGDTTTL | 1119 |
| ANARGDLQNT | 1120 |
| QNIRGDIRTV | 1121 |
| AALRGDHGQM | 1122 |
| TTDRGDLSAR | 1123 |
| LNVRGDLVHT | 1124 |
| YSTRGDHTVL | 1125 |
| TNARGDLTVS | 1126 |
| TNARGDYTAL | 1127 |
| AEGRGDTRGS | 1128 |
| TNIRGDQSSV | 1129 |
| VDRRGDTMTM | 1130 |
| QIGRGDVTPL | 1131 |
| MQARGDLLGV | 1132 |
| NTQRGDYASV | 1133 |
| SDTRGDRITQ | 1134 |
| SAIRGDYRDV | 1135 |
| VGVRGDVHPL | 1136 |
| TVLRGDAERL | 1137 |
| ASTRGDLSGQ | 1138 |
| DSRRGDGQNL | 1139 |
| IDKRGDIQGL | 1140 |
| TVTRGDLLVN | 1141 |
| DSTRGDRLGL | 1142 |
| AANRGDYASL | 1143 |
| RDYRGDTSSL | 1144 |
| SNIRGDASLH | 1145 |
| NLQRGDRTDF | 1146 |
| NASRGDHSSM | 1147 |
| TSMRGDYTHV | 1148 |
| TSRRGDLNDV | 1149 |
| QSHRGDVQSL | 1150 |
| STTRGDYQSV | 1151 |
| YSTRGDHAML | 1152 |
| TSARGDLIHT | 1153 |
| ATARGDRESF | 1154 |
| ASTRGDYSTM | 1155 |
| SNNRGDVQRL | 1156 |
| ERLRGDQHII | 1157 |
| SSIRGDHATL | 1158 |
| NPTRGDIATV | 1159 |
| MSTRGDLSVN | 1160 |
| MDRRGDITYA | 1161 |
| NATRGDLMSA | 1162 |
| SDHRGDRTYQ | 1163 |
| NWVRGDLSTA | 1164 |
| SSHRGDLSAT | 1165 |
| NATRGDYREI | 1166 |
| DTLRGDLQTA | 1167 |
| IAVRGDLTPV | 1168 |
| TLLRGDLAHS | 1169 |
| MNTRGDHTVL | 1170 |
| TGHRGDIAVY | 1171 |
| TSNRGDQMSN | 1172 |
| SATRGDHTAI | 1173 |
| SSVRGDREHA | 1174 |
| TNSRGDLVVH | 1175 |
| ETRRGDLSSQ | 1176 |
| TYARGDITLT | 1177 |
| SASRGDTLHL | 1178 |
| DNQRGDLSSR | 1179 |
| TQSRGDLRDA | 1180 |
| ENRRGDLTNA | 1181 |
| TSIRGDISSV | 1182 |
| ISARGDTMTL | 1183 |
| SRVRGDQDHW | 1184 |
| SGNRGDIASY | 1185 |
| NEQRGDRYNH | 1186 |
| EALRGDVRAL | 1187 |
| VDRRGDYTQM | 1188 |
| NNVRGDYTSV | 1189 |
| QTYRGDASVL | 1190 |
| SNYRGDHGSL | 1191 |
| TSSRGDLREV | 1192 |
| QYTRGDVSNL | 1193 |
| SDLRGDVRER | 1194 |
| QNARGDTTAL | 1195 |
| NSLRGDRDTM | 1196 |
| SNSRGDQAQV | 1197 |
| EATRGDRSTL | 1198 |
| VPQRGDITNL | 1199 |
| DKIRGDLRSI | 1200 |
| SAARGDYSIV | 1201 |
| VGLRGDLIGQ | 1202 |
| QAGRGDLTVI | 1203 |
| SKTRGDFQEA | 1204 |
| GTARGDYSML | 1205 |
| ISTRGDLVTI | 1206 |
| TGTRGDREYM | 1207 |
| MTTRGDLSIT | 1208 |
| STSRGDMTSV | 1209 |
| GPARGDFTSS | 1210 |
| VDRRGDLGHV | 1211 |
| NSGRGDMSQL | 1212 |
| SQGRGDLERY | 1213 |
| VFGRGDQYTL | 1214 |
| IVGRGDLHLQ | 1215 |
| SYSRGDTSRL | 1216 |
| MSSRGDRATI | 1217 |
| MSSRGDLTRV | 1218 |
| QHTRGDFGNL | 1219 |
| ETRRGDLSSQ | 1220 |
| TGTRGDLRAI | 1221 |
| QMARGDLSTA | 1222 |
| LVERGDRIMN | 1223 |
| GLVRGDLNAR | 1224 |
| NNPRGDLSSV | 1225 |
| HEKRGDLSNS | 1226 |
| SQARGDLHQT | 1227 |
| FTGRGDLRTA | 1228 |
| QSIRGDTGHL | 1229 |
| SAGRGDMSVL | 1230 |
| SERRGDEHKW | 1231 |
| TTGRGDLVSL | 1232 |
| LGLRGDQIGQ | 1233 |
| VALRGDLTHQ | 1234 |
| MIGRGDQAPL | 1235 |
| FQARGDHSTL | 1236 |
| NSVRGDHSSL | 1237 |
| WPNRGDLQST | 1238 |
| SASRGDYQTL | 1239 |
| TMQRGDLHTI | 1240 |
| TALRGDLAGT | 1241 |
| VNARGDFSQT | 1242 |
| GWIRGDRTSM | 1243 |
| TFSRGDHTVL | 1244 |
| SGARGDLVGV | 1245 |
| NNVRGDYTSV | 1246 |
| QTARGDHVVL | 1247 |
| TLIRGDLTRS | 1248 |
| VTTRGDRLEL | 1249 |

TABLE 5
VP1 capsid proteins

| SEQ | |
|---|---|
| ID | |
| NO.: | VP1 Capsid Protein Sequence |
| 1250 | MAADGYLPDWLEDNLSEGIREWWDLKPGAPKPKANQQKQDDGRGLVLPGYKYLGPFNGLD |
| | KGEPVNAADAAALEHDKAYDQQLKAGDNPYLRYNHADAEFQERLQEDTSFGGNLGRAVFQ |
| | AKKRVLEPLGLVEEGAKTAPGKKRPVEPSPQRSPDSSTGIGKTGQQPAKKRLNFGQTGDS |
| | ESVPDPQPIGEPPAGPSGLGSGTMAAGGGAPMADNNEGADGVGSSSGNWHCDSAWLGDRV |
| | ITTSTRPWALPTYNNHLYKQISNGTSGGSTNDNTYFGYSTPWGYFDFNRFHCHFSPRDWQ |
| | RLINNNWGFRPKRLNFKLFNIQVKEVTQNEGTKTIANNLTSTIQVFTDSEYQLPYVLGSA |
| | HQGCPPPFPADVFMIPQYGYLTLNNGSQAVGRSSFYCLEYFPSQMRRTGNNFEFSYQFED |
| | VPFHSSYAHSQSLDRLMNPLIDQYLYYLSRTQSTGGTAGTQQLLFSQAGPNNMSAQAKNW |
| | LPGPCYRQQRVSTTLSQNNNSNFAWTGATKYHLNGRDSLVNPGVAMATHKDDEERFFPSS |
| | GVLMFGKQGAGKDNVDYSSVMLTSEEEIKTTNPVATEQYGVVADNLQQQNAAPIVGAVNS |
| | QGALPGMVWQNRDVYLQGPIWAKIPHTDGNFHPSPLMGGFGLKHPPPQILIKNTPVPADP |
| | PTTFSQAKLASFITQYSTGQVSVEIEWELQKENSKRWNPEIQYTSNYYKSTNVDFAVNTE |
| | GTYSEPRPIGTRYLTRNL |
| 1251 | MAADGYLPDWLEDNLSEGIREWWDLKPGAPKPKANQQKQDDGRGLVLPGYKYLGPFNGLD |
| | KGEPVNAADAAALEHDKAYDQQLKAGDNPYLRYNHADAEFQERLQEDTSFGGNLGRAVFQ |
| | AKKRVLEPLGLVEEGAKTAPGKKRPVEPSPQRSPDSSTGIGKTGQQPAKKRLNFGQTGDS |
| | ESVPDPQPIGEPPAGPSGLGSGTMAAGGGAPMADNNEGADGVGSSSGNWHCDSAWLGDRV |
| | ITTSTRPWALPTYNNHLYKQISNGTSGGSTNDNTYFGYSTPWGYFDFNRFHCHFSPRDWQ |
| | RLINNNWGFRPKRLNFKLFNIQVKEVTQNEGTKTIANNLTSTIQVFTDSEYQLPYVLGSA |
| | HQGCPPPFPADVFMIPQYGYLTLNNGSQAVGRSSFYCLEYFPSQMRRTGNNFEFSYQFED |
| | VPFHSSYAHSQSLDRLMNPLIDQYLYYLSRTQSTGGTAGTQQLLFSQAGPNNMSAQAKNW |
| | LPGPCYRQQRVSTTLSQNNNSNFAWTGATKYHLNGRDSLVNPGVAMATHKDDEERFFPSS |
| | GVLMFGKQGAGKDNVDYSSVMLTSEEEIKTTNPVATEQYGVVADNLQQQNAAPIVGAVNS |
| | QGALPGMVWQNRDVYLQGPIWAKIPHTDGNFHPSPLMGGFGLKHPPPQILIKNTPVPADP |
| | PTTFSQAKLASFITQYSTGQVSVEIEWELQKENSKRWNPEIQYTSNYYKSTNVDFAVNTE |
| | GTYSEPRPIGTRYLTRNL |
| 1252 | MAADGYLPDWLEDNLSEGIREWWDLKPGAPKPKANQQKQDDGRGLVLPGYKYLGPFNGLD |
| | KGEPVNAADAAALEHDKAYDQQLKAGDNPYLRYNHADAEFQERLQEDTSFGGNLGRAVFQ |
| | AKKRVLEPLGLVEEAAKTAPGKKRPVEPSPQRSPDSSTGIGKKGQQPAKKRLNFGQTGDS |
| | ESVPDPQPIGEPPAGPSGLGSGTMAAGGGAPMADNNEGADGVGSSSGNWHCDSTWLGDRV |
| | ITTSTRTWALPTYNNHLYKQISNGTSGGSTNDNTYFGYSTPWGYFDFNRFHCHFSPRDWQ |
| | RLINNNWGFRPKRLSFKLFNIQVKEVTQNEGTKTIANNLTSTIQVFTDSEYQLPYVLGSA |
| | HQGCLPPFPADVFMIPQYGYLTLNNGSQAVGRSSFYCLEYFPSQMLRTGNNFEFSYTFED |
| | VPFHSSYAHSQSLDRLMNPLIDQYLYYLSRTQSTGGTQGTQQLLFSQAGPANMSAQAKNW |
| | LPGPCYRQQRVSTTLSQSNNSNFAWTGATKYHLNGRDSLVNPGVAMATHKDDEERFFPSS |
| | GVLMFGKQGAGRDNVDYSSVMLTSEEEIKTTNPVATEQYGVVADNLQQTNTGPIVGNVNS |
| | QGALPGMVWQNRDVYLQGPIWAKIPHTDGNFHPSPLMGGLGLKHPPPQILIKNTPVPADP |
| | PTTFSQAKLASFITQYSTGQVSVEIEWELQKENSKRWNPEIQYTSNYYKSTNVDFAVNTE |
| | GTYSEPRPIGTRYLTRNL |
| 1253 | MAADGYLPDWLEDNLSEGIREWWDLKPGAPKPKANQQKQDDGRGLVLPGYKYLGPFNGLD |
| | KGEPVNAADAAALEHDKAYDQQLKAGDNPYLRYNHADAEFQERLQEDTSFGGNLGRAVFQ |
| | AKKRVLEPLGLVEEAAKTAPGKKRPVEPSPQRSPDSSTGIGKKGQRPAKKRLNFGQTGDS |
| | ESVPDPQPIGEPPAGPSGLGSGTMAAGGGAPMADNNEGADGVGSSSGNWHCDSTWLGDRV |
| | ITTSTRTWALPTYNNHLYKQISNGTSGGSTNDNTYFGYSTPWGYFDFNRFHCHFSPRDWQ |
| | RLINNNWGFRPKRLSFKPFNIQVKEVTQNEGTKTIANNLTSTIQVFTDSEYQLPYVLGSA |
| | HQGCLPPFPADVFMIPQYGYLTLNNGSQAVGRSSFYCLEYFPSQMLRTGNNFEFSYTFED |
| | VPFHSSYAHSQSLDRLMNPLIDQYLHYLSRTQSTGGTQGTQQLLFSQAGPANMSAQAKNW |
| | LPGPCYRQQRVSTTLSQNNNSNFAWTGATKYHLNGRDSLVNPGVAMATHKDDEERFFPSS |
| | GVLMFGKQGAGRDNVDYSSVMLTSEEEIKTTNPVATEQYGVVADNLQQTNTGPIVGNVNS |
| | QGALPGMVWQNRDVYLQGPIWAKIPHTDGNFHPSPLMGGFGLKHPPPQILIKNTPVPADP |
| | PTTFSQAKLASFITQYSTGQVSVEIEWELQKENSKRWNPEIQYTSNYYKSTNVDFAVNTE |
| | GTYSEPRPIGTRYLTRNL |
| 1254 | MAADGYLPDWLEDNLSEGIREWWDLKPGAPKPKANQQKQDDGRGLVLPGYKYLGPFNGLD |
| | KGEPVNAADAAALEHDKAYDQQLKAGDNPYLRYNHADAEFQERLQEDTSFGGNLGRAVFQ |
| | AKKRVLEPLGLVEEAAKTAPGKKRPVEPSPQRSPDSSTGIGKKGQQPAKKRLSFGQTGDS |
| | ESVPDPQPIGEPPAGPSGLGSGTMAAGGGAPMADNNEGADGVGSSSGNWHCDSTWLGDRV |
| | ITTSTRTWALPTYNNHLYKQISNGTSGGSTNDNTYFGYSTPWGYFDFNRFHCHFSPRDWQ |
| | RLINNNWGFRPKRLSFKLFNIQVKEVTQNEGTKTIANNLTSTIQVFTDSEYQLPYVLGSA |
| | HQGCLPPFPADVFMIPQYGYLTLNNGSQAVGRSSFYCLEYFPSQMLRTGNNSEFSYTFED |
| | VPFHSSYAHSQSLDRLMNPLIDQYLYYLSRTQSTGGTQGTQQLLFSQAGPANMSAQAKNW |
| | LPGPCYRQQRVSTTLSQNNNSNFAWTGATKYHLNGRDSLVNPGVAMATHKDDEERFFPSS |
| | GVLMFGKQGAGRDNVDYSSVMLTSEEEIKTTNPVATEQYGVVADNLQQTNTGPIVGNVNS |
| | QGALPGMVWQNRDVYLQGPIWAKIPHTDGNFHPSPLMGGFGLKHPPPQILIKNTPVPADP |
| | PTTFSQAKLASFITQYSTGQVSVEIEWELQKENSKRWNPEIQYTSNYYKSTNVDFAVNTE |
| | GTYSEPRPIGTRYLTRNL |
| 1255 | MAADGYLPDWLEDNLSEGIREWWDLKPGAPKPKANQQKQDDGRGLVLPGYKYLGPFNGLD |
| | KGEPVNAADAAALEHDKAYDQQLKAGDNPYLRYNHADAEFQERLQEDTSFGGNLGRAVFQ |
| | AKKRVLEPLGLVEEAAKTAPGKKRPVEPSPQRSPDSSTGIGKKGQQPAKKRLNFGQTGDS |
| | ESVPDPQPIGEPPAGPSGLGSGTMAAGGGAPMADNNEGADGVGSSSGNWHCDSTWLGDRV |
| | ITTSTRTWALPTYNNHLYKQISNGTSGGSTNDNTYFGYSTPWGYFDFNRFHCHFSPRDWQ |
| | RLINNNWGFRPKRLSFKLFNIQVKEVTQNEGTKTIANNLTSTIQVFTDSEYQLPYVLGSA |
| | HQGCLPPFPADVFMIPQYGYLTLNNGSQAVGRSSFYCLEYFPSQMLRTGNNFEFSYTFED |
| | VPFHSSYAHSQSLDRLMNPLIDQYLYYLSRTQSTGGTQGTQQLLFSQAGPANMSAQAKNW |
| | LPGPCYRQQRVSTTLSQNNNSNFAWTGATKYHLNGRDSLVNPGVAMATHKDDEERFFPSS |
| | GVLMFGKQGAGRDNVDYSSVMLTSEEEIKTTNPVATEQYGVVADNLQQTNTGPIVGNVNS |
| | QGALPGMVWQNRDVYLQGPIWAKIPHTDGNFHPSPLMGGFGLKHPPPQILIKNTPVPADP |
| | PTTFSQAKLASFITQYSTGQVSVEIEWELQKENSKRWNPEIQYTSNYYKSTNVDFAVNTE |
| | GTYSEPRPIGTRYLTRNL |
| 1256 | MAADGYLPDWLEDNLSEGIREWWDLKPGAPKPKANQQKQDDGRGLVLPGYKYLGPFNGLD |
| | KGEPVNAADAAALEHDKAYDQQLKAGDNPYLRYNHADAEFQERLQEDTSFGGNLGRAVFQ |
| | AKKRVLEPLGLVEEAAKTAPGKKRPVEPSPQRSPDSSTGIGKKGQQPAKKRLNFGQTGDS |
| | ESVPDPQPIGEPPAGPSGLGSGTMAAGGGAPMADNNEGADGVGSSSGNWHCDSTWLGDRV |
| | ITTSTRTWALPTYNNHLYKQISNGTSGGSTNDNTYFGYSTPWGYFDFNRFHCHFSPRDWQ |
| | RLINNNWGFRPKRLSFKLFNIQVKEVTQNEGTKTIANNLTSTIQVFTDSEYQLPYVLGSA |
| | HQGCLPPFPADVFMIPQYGYLTLNNGSQAVGRSSFYCLEYFPSQMLRTGNNFEFSYTFED |
| | VPFHSSYAHSQSLDRLMNPLIDQYLYYLSRTQSTGGTQGTQQLLFSQAGPANMSAQAKNW |
| | LPGPCYRQQRVSTTLSQNNNSNFAWTGATKYHLNGRDSLVNPGVAMATHKDDEERFFPSS |
| | GVLMFGKQGAGRDNVDYSSVMLTSEEEIKTTNPVATEQYGVVADNLQQTNTGPIVGNVNS |
| | QGALPGMVWQNRDVYLQGPIWAKIPHTDGNFHPSPLMGGFGLKHPPPQILIKNTPVPADP |
| | PTTFSQAKLASFITQYSTGQVSVEIEWELQKENSKRWNPEIQYTSNYYKSTNVDFAVNTE |
| | GTYSEPRPIGTRYLTRNL |
| 1257 | MAADGYLPDWLEDNLSEGIREWWDLKPGAPKPKANQQKQDDGRGLVLPGYKYLGPFNGLD |
| | KGEPVNAADAAALEHDKAYDQQLKAGDNPYLRYNHADAEFQERLQEDTSFGGNLGRAVFQ |
| | AKKRVLEPLGLVEEAAKTAPGKKRPVEPSPQRSPDSSTGIGKKGQQPAKKRLNFGQTGDS |
| | ESVPDPQPIGEPPAGPSGLGSGTMAAGGGAPMADNNEGADGVGSSSGNWHCDSTWLGDRV |
| | ITTSTRTWALPTYNNHLYKQISNGTSGGSTNDNTYFGYSTPWGYFDFNRFHCHFSPRDWQ |
| | RLINNNWGFRPKRLSFKLFNIQVKEVTQNEGTKTIANNLTSTIQVFTDSEYQLPYVLGSA |
| | HQGCLPPFPADVFMIPQYGYLTLNNGSQAVGRSSFYCLEYFPSQMLRTGNNFEFSYTFED |
| | VPFHSSYAHSQSLDRLMNPLIDQYLYYLSRTQSTGGTQGTQQLLFSQAGPANMSAQAKNW |
| | LPGPCYRQQRVSTTLSQNNNSNFAWTGATKYHLNGRDSLVNPGVAMATHKDDEERFFPSS |
| | GVLMFGKQGAGRDNVDYSSVMLTSEEEIKTTNPVATEQYGVVADNLQQTNTGPIVGNVNS |
| | QGALPGMVWQNRDVYLQGPIWAKIPHTDGNFHPSPLMGGFGLKHPPPQILIKNTPVPADP |
| | PTTFSQAKLASFITQYSTGQVSVEIEWELQKENSKRWNPEIQYTSNYYKSTNVDFAVNTE |
| | GTYSEPRPIGTRYLTRNL |
| 1258 | MAADGYLPDWLEDNLSEGIREWWDLKPGAPKPKANQQKQDDGRGLVLPGYKYLGPFNGLD |
| | KGEPVNAADAAALEHDKAYDQQLKAGDNPYLRYNHADAEFQERLQEDTSFGGNLGRAVFQ |
| | AKKRVLEPLGPVEEAAKTAPGKKRPVEPPPQRSPDSSTGIGKKGQQPAKKRLNFGQTGDS |
| | ESVPDPQPIGEPPAGPSGLGSGTMAAGGGAPMADNNEGADGVGSSSGNWHCDSTWLGDRV |
| | ITTSTRTWALPTYNNHLYKQISNGTSGGSTNDNTYFGYSTPWGYFDFNRFHCHFSPRDWQ |
| | RLINNNWGFRPKRLSFKLFNIQVKEVTQNEGTKTVANNLTSTIQVFTDSEYQLPYVLGSA |
| | HQGCLPPFPADVFMIPQYGYLTLNNGSQAVGRSSFYCLEYFPSQMLRTGNNFEFSYTFED |
| | VPFHSSYAHSQSLDRLMNPLIDQYLYYLSRTQSTGGTQGTQQLLFSQAGPANMSAQAKNW |
| | LPGPCYRQQRVSTTLSQNNNSNFAWTGATKYHLNGRDSLVNPGVAMATHKDDEERFFPSS |
| | GVLMFGKQGAGRDNVDYSSVMLTSEEEIKTTNPVATEQYGVVADNLQQTNTGPIVGNVNS |
| | QGALPGMVWQNRDVYLQGPIWAKIPHTDGNFHPSPLMGGFGLKHPPPQILIKNTPVPADP |
| | PTTFSQAKLASFITQYSTGQVSVEIEWELQKENSKRWNPEIQYTSNYYKSTNVDFAVNTE |
| | GTYSEPRPIGTRYLTRNL |
| 1259 | MAADGYLPDWLEDNLSEGIREWWDLKPGAPKPKANQQKQDDGRGLVLPGYKYLGPFNGLD |
| | KGEPVNAADAAALEHDKAYDQQLKAGDNPYLRYNHADAEFQERLQEDTSFGGNLGRAVFQ |
| | AKKRVLEPLGLVEEAAKTAPGKKRPVEPSPQRSPDSSTGIGKKGQQPAKKRLNFGQTGDS |
| | ESVPDPQPIGEPPAGPSGLGSGTMAAGGGAPMADNNEGADGVGSSSGNWHCDSTWLGDRV |
| | ITTSTRTWALPTYNNHLYKQISNGTSGGSTNDNTYFGYSTPWGYFDFNRFHCHFSPRDWQ |
| | RLINNNWGFRPKRLSFKLFNIQVKEVTQDEGTKTIANNLTSTIQVFTDSEYQLPYVLGSA |
| | HQGCLPPFPADVFMIPQYGYLTLNNGSQAVGRSSFYCLEYFPSQMLRTGNNFEFSYTFED |
| | VPFHSSYAHSQSLDRLMNPLIDQYLYYLSRTQSTGGTQGTQQLLFSQAGPANMSARAKNW |
| | LPGPCYRQQRVSTTLSQNNNSNFAWTGATKYHLNGRDSLVNPGVAMATHKDDEERFFPSS |
| | GVLMFGKQGAGRDNVDYSSVMLTSEEEIKTTNPVATEQYGVVADNLQQANTGPIVGNVNS |
| | QGALPGMVWQNRDVYLQGPIWAKIPHTDGNFHPSPLMGGFGLKHPPPQILIKNTPVPADP |
| | PTTFSQAKLASFITQYSTGQVSVEIEWELQKENSKRWNPEIQYTSNYYKSTNVDFAVNSE |
| | GTYSEPRPIGTRYLTRNL |
| 1260 | MAADGYLPDWLEDNLSEGIREWWALKPGAPQPKANQQHQDNARGLVLPGYKYLGPGNGLD |
| | KGEPVNAADAAALEHDKAYDQQLKAGDNPYLKYNHADAEFQERLKEDTSFGGNLGRAVFQ |
| | AKKRLLEPLGLVEEAAKTAPGKKRPVEQSPQEPDSSAGIGKSGAQPAKKRLNFGQTGDTE |
| | SVPDPQPIGEPPAAPSGVGSLTMASGGGAPVADNNEGADGVGSSSGNWHCDSQWLGDRVI |
| | TTSTRTWALPTYNNHLYKQISNSTSGGSSNDNAYFGYSTPWGYFDFNRFHCHFSPRDWQR |
| | LINNNWGFRPKRLNFKLFNIQVKEVTDNNGVKTIANNLTSTVQVFTDSDYQLPYVLGSAH |
| | EGCLPPFPADVFMIPQYGYLTLNDGSQAVGRSSFYCLEYFPSQMLRTGNNFQFSYEFENV |
| | PFHSSYAHSQSLDRLMNPLIDQYLYYLSKTINGSGQNQQTLKFSVAGPSNMAVQGRNYIP |
| | GPSYRQQRVSTTVTQNNNSEFAWPGASSWALNGRNSLMNPGPAMASHKEGEDRFFPLSGS |
| | LIFGKQGTGRDNVDADKVMITNEEEIKTTNPVATESYGQVATNHQSNSRGDYNSLAQAQT |
| | GWVQNQGILPGMVWQDRDVYLQGPIWAKIPHTDGNFHPSPLMGGFGMKHPPPQILIKNTP |
| | VPADPPTAFNKDKLNSFITQYSTGQVSVEIEWELQKENSKRWNPEIQYTSNYYKSNNVEF |
| | AVNTEGVYSEPRPIGTRYLTRNL |
| 1261 | MAADGYLPDWLEDNLSEGIREWWALKPGAPQPKANQQHQDNARGLVLPGYKYLGPGNGLD |
| | KGEPVNAADAAALEHDKAYDQQLKAGDNPYLKYNHADAEFQERLKEDTSFGGNLGRAVFQ |
| | AKKRLLEPLGLVEEAAKTAPGKKRPVEQSPQEPDSSAGIGKSGAQPAKKRLNFGQTGDTE |
| | SVPDPQPIGEPPAAPSGVGSLTMASGGGAPVADNNEGADGVGSSSGNWHCDSQWLGDRVI |
| | TTSTRTWALPTYNNHLYKQISNSTSGGSSNDNAYFGYSTPWGYFDFNRFHCHFSPRDWQR |
| | LINNNWGFRPKRLNFKLFNIQVKEVTDNNGVKTIANNLTSTVQVFTDSDYQLPYVLGSAH |
| | EGCLPPFPADVFMIPQYGYLTLNDGSQAVGRSSFYCLEYFPSQMLRTGNNFQFSYEFENV |
| | PFHSSYAHSQSLDRLMNPLIDQYLYYLSKTINGSGQNQQTLKFSVAGPSNMAVQGRNYIP |
| | GPSYRQQRVSTTVTQNNNSEFAWAAASSWALNGRNSLMNPGPAMASHKEGEDRFFPLSGS |
| | LIFGKQGTGRDNVDADKVMITNEEEIKTTNPVATESYGQVATNHQGQSGRGDLGLSAQAA |
| | QTGWVQNQGILPGMVWQDRDVYLQGPIWAKIPHTDGNFHPSPLMGGFGMKHPPPQILIKN |
| | TPVPADPPTAFNKDKLNSFITQYSTGQVSVEIEWELQKENSKRWNPEIQYTSNYYKSNNV |
| | EFAVNTEGVYSEPRPIGTRYLTRNL |
| 1262 | MAADGYLPDWLEDNLSEGIREWWALKPGAPQPKANQQHQDNARGLVLPGYKYLGPGNGLD |
| | KGEPVNAADAAALEHDKAYDQQLKAGDNPYLKYNHADAEFQERLKEDTSFGGNLGRAVFQ |
| | AKKRLLEPLGLVEEAAKTAPGKKRPVEQSPQEPDSSAGIGKSGAQPAKKRLNFGQTGDTE |
| | SVPDPQPIGEPPAAPSGVGSLTMASGGGAPVADNNEGADGVGSSSGNWHCDSQWLGDRVI |
| | TTSTRTWALPTYNNHLYKQISNSTSGGSSNDNAYFGYSTPWGYFDFNRFHCHFSPRDWQR |
| | LINNNWGFRPKRLNFKLFNIQVKEVTDNNGVKTIANNLTSTVQVFTDSDYQLPYVLGSAH |
| | EGCLPPFPADVFMIPQYGYLTLNDGSQAVGRSSFYCLEYFPSQMLRTGNNFQFSYEFENV |
| | PFHSSYAHSQSLDRLMNPLIDQYLYYLSKTINGSGQNQQTLKFSVAGPSNMAVQGRNYIP |
| | GPSYRQQRVSTTVTQNNNSEFAWPGASSWALNGRNSLMNPGPAMASHKEGEDRFFPLSGS |
| | LIFGKQGTGRDNVDADKVMITNEEEIKTTNPVATESYGQVATNHQSGQSGRGDLGLSAQA |
| | ATGWVQNQGILPGMVWQDRDVYLQGPIWAKIPHTDGNFHPSPLMGGFGMKHPPPQILIKN |
| | TPVPADPPTAFNKDKLNSFITQYSTGQVSVEIEWELQKENSKRWNPEIQYTSNYYKSNNV |
| | EFAVNTEGVYSEPRPIGTRYLTRNL |
| 1263 | MAADGYLPDWLEDNLSEGIREWWALKPGAPQPKANQQHQDNARGLVLPGYKYLGPGNGLD |
| | KGEPVNAADAAALEHDKAYDQQLKAGDNPYLKYNHADAEFQERLKEDTSFGGNLGRAVFQ |
| | AKKRLLEPLGLVEEAAKTAPGKKRPVEQSPQEPDSSAGIGKSGAQPAKKRLNFGQTGDTE |
| | SVPDPQPIGEPPAAPSGVGSLTMASGGGAPVADNNEGADGVGSSSGNWHCDSQWLGDRVI |
| | TTSTRTWALPTYNNHLYKQISNSTSGGSSNDNAYFGYSTPWGYFDFNRFHCHFSPRDWQR |
| | LINNNWGFRPKRLNFKLFNIQVKEVTDNNGVKTIANNLTSTVQVFTDSDYQLPYVLGSAH |
| | EGCLPPFPADVFMIPQYGYLTLNDGSQAVGRSSFYCLEYFPSQMLRTGNNFQFSYEFENV |
| | PFHSSYAHSQSLDRLMNPLIDQYLYYLSKTINGSGQNQQTLKFSVAGPSNMAVQGRNYIP |
| | GPSYRQQRVSTTVTQNNNSEFAWPGASSWALNGRNSLMNPGPAMASHKEGEDRFFPLSGS |
| | LIFGKQGTGRDNVDADKVMITNEEEIKTTNPVATESYGQVATNHQGQSGRGDAVGVAQAA |
| | QTGWVQNQGILPGMVWQDRDVYLQGPIWAKIPHTDGNFHPSPLMGGFGMKHPPPQILIKN |
| | TPVPADPPTAFNKDKLNSFITQYSTGQVSVEIEWELQKENSKRWNPEIQYTSNYYKSNNV |
| | EFAVNTEGVYSEPRPIGTRYLTRNL |
| 1264 | MAADGYLPDWLEDNLSEGIREWWALKPGAPQPKANQQHQDNARGLVLPGYKYLGPGNGLD |
| | KGEPVNAADAAALEHDKAYDQQLKAGDNPYLKYNHADAEFQERLKEDTSFGGNLGRAVFQ |
| | AKKRLLEPLGLVEEAAKTAPGKKRPVEQSPQEPDSSAGIGKSGAQPAKKRLNFGQTGDTE |
| | SVPDPQPIGEPPAAPSGVGSLTMASGGGAPVADNNEGADGVGSSSGNWHCDSQWLGDRVI |
| | TTSTRTWALPTYNNHLYKQISNSTSGGSSNDNAYFGYSTPWGYFDFNRFHCHFSPRDWQR |
| | LINNNWGFRPKRLNFKLFNIQVKEVTDNNGVKTIANNLTSTVQVFTDSDYQLPYVLGSAH |
| | EGCLPPFPADVFMIPQYGYLTLNDGSQAVGRSSFYCLEYFPSQMLRTGNNFQFSYEFENV |
| | PFHSSYAHSQSLDRLMNPLIDQYLYYLSKTINGSGQNQQTLKFSVAGPSNMAVQGRNYIP |
| | GPSYRQQRVSTTVTQNNNSEFAWPGASSWALNGRNSLMNPGPAMASHKEGEDRFFPLSGS |
| | LIFGKQGTGRDNVDADKVMITNEEEIKTTNPVATESYGQVATNHQSGQSGRGDAVGVAQA |
| | ATGWVQNQGILPGMVWQDRDVYLQGPIWAKIPHTDGNFHPSPLMGGFGMKHPPPQILIKN |
| | TPVPADPPTAFNKDKLNSFITQYSTGQVSVEIEWELQKENSKRWNPEIQYTSNYYKSNNV |
| | EFAVNTEGVYSEPRPIGTRYLTRNL |
| 1265 | MAADGYLPDWLEDNLSEGIREWWALKPGAPQPKANQQHQDNARGLVLPGYKYLGPGNGLD |
| | KGEPVNAADAAALEHDKAYDQQLKAGDNPYLKYNHADAEFQERLKEDTSFGGNLGRAVFQ |
| | AKKRLLEPLGLVEEAAKTAPGKKRPVEQSPQEPDSSAGIGKSGAQPAKKRLNFGQTGDTE |
| | SVPDPQPIGEPPAAPSGVGSLTMASGGGAPVADNNEGADGVGSSSGNWHCDSQWLGDRVI |
| | TTSTRTWALPTYNNHLYKQISNSTSGGSSNDNAYFGYSTPWGYFDFNRFHCHFSPRDWQR |
| | LINNNWGFRPKRLNFKLFNIQVKEVTDNNGVKTIANNLTSTVQVFTDSDYQLPYVLGSAH |
| | EGCLPPFPADVFMIPQYGYLTLNDGSQAVGRSSFYCLEYFPSQMLRTGNNFQFSYEFENV |
| | PFHSSYAHSQSLDRLMNPLIDQYLYYLSKTINGSGQNQQTLKFSVAGPSNMAVQGRNYIP |
| | GPSYRQQRVSTTVTQNNNSEFAWAAASSWALNGRNSLMNPGPAMASHKEGEDRFFPLSGS |
| | LIFGKQGTGRDNVDADKVMITNEEEIKTTNPVATESYGQVATNHQSGQSGRGDLGLSAQA |
| | ATGWVQNQGILPGMVWQDRDVYLQGPIWAKIPHTDGNFHPSPLMGGFGMKHPPPQILIKN |
| | TPVPADPPTAFNKDKLNSFITQYSTGQVSVEIEWELQKENSKRWNPEIQYTSNYYKSNNV |
| | EFAVNTEGVYSEPRPIGTRYLTRNL |
| 1266 | MAADGYLPDWLEDNLSEGIREWWALKPGAPQPKANQQHQDNARGLVLPGYKYLGPGNGLD |
| | KGEPVNAADAAALEHDKAYDQQLKAGDNPYLKYNHADAEFQERLKEDTSFGGNLGRAVFQ |
| | AKKRLLEPLGLVEEAAKTAPGKKRPVEQSPQEPDSSAGIGKSGAQPAKKRLNFGQTGDTE |
| | SVPDPQPIGEPPAAPSGVGSLTMASGGGAPVADNNEGADGVGSSSGNWHCDSQWLGDRVI |
| | TTSTRTWALPTYNNHLYKQISNSTSGGSSNDNAYFGYSTPWGYFDFNRFHCHFSPRDWQR |
| | LINNNWGFRPKRLNFKLFNIQVKEVTDNNGVKTIANNLTSTVQVFTDSDYQLPYVLGSAH |
| | EGCLPPFPADVFMIPQYGYLTLNDGSQAVGRSSFYCLEYFPSQMLRTGNNFQFSYEFENV |
| | PFHSSYAHSQSLDRLMNPLIDQYLYYLSKTINGSGQNQQTLKFSVAGPSNMAVQGRNYIP |
| | GPSYRQQRVSTTVTQNNNSEFAWAAASSWALNGRNSLMNPGPAMASHKEGEDRFFPLSGS |
| | LIFGKQGTGRDNVDADKVMITNEEEIKTTNPVATESYGQVATNHQGQSGRGDAVGVAQAA |
| | QTGWVQNQGILPGMVWQDRDVYLQGPIWAKIPHTDGNFHPSPLMGGFGMKHPPPQILIKN |
| | TPVPADPPTAFNKDKLNSFITQYSTGQVSVEIEWELQKENSKRWNPEIQYTSNYYKSNNV |
| | EFAVNTEGVYSEPRPIGTRYLTRNL |
| 1267 | MAADGYLPDWLEDNLSEGIREWWALKPGAPQPKANQQHQDNARGLVLPGYKYLGPGNGLD |
| | KGEPVNAADAAALEHDKAYDQQLKAGDNPYLKYNHADAEFQERLKEDTSFGGNLGRAVFQ |
| | AKKRLLEPLGLVEEAAKTAPGKKRPVEQSPQEPDSSAGIGKSGAQPAKKRLNFGQTGDTE |
| | SVPDPQPIGEPPAAPSGVGSLTMASGGGAPVADNNEGADGVGSSSGNWHCDSQWLGDRVI |
| | TTSTRTWALPTYNNHLYKQISNSTSGGSSNDNAYFGYSTPWGYFDFNRFHCHFSPRDWQR |
| | LINNNWGFRPKRLNFKLFNIQVKEVTDNNGVKTIANNLTSTVQVFTDSDYQLPYVLGSAH |
| | EGCLPPFPADVFMIPQYGYLTLNDGSQAVGRSSFYCLEYFPSQMLRTGNNFQFSYEFENV |
| | PFHSSYAHSQSLDRLMNPLIDQYLYYLSKTINGSGQNQQTLKFSVAGPSNMAVQGRNYIP |
| | GPSYRQQRVSTTVTQNNNSEFAWAAASSWALNGRNSLMNPGPAMASHKEGEDRFFPLSGS |
| | LIFGKQGTGRDNVDADKVMITNEEEIKTTNPVATESYGQVATNHQSGQSGRGDAVGVAQA |
| | ATGWVQNQGILPGMVWQDRDVYLQGPIWAKIPHTDGNFHPSPLMGGFGMKHPPPQILIKN |
| | TPVPADPPTAFNKDKLNSFITQYSTGQVSVEIEWELQKENSKRWNPEIQYTSNYYKSNNV |
| | EFAVNTEGVYSEPRPIGTRYLTRNL |
| 1268 | MAADGYLPDWLEDNLSEGIREWWALKPGAPKPKANQQKQDDGRGLVLPGYKYLGPFNGLD |
| | KGEPVNAADAAALEHDKAYDQQLQAGDNPYLRYNHADAEFQERLQEDTSFGGNLGRAVFQ |
| | AKKRLLEPLGLVEEAAKTAPGKKRPVEQSPQEPDSSAGIGKSGAQPAKKRLNFGQTGDTE |
| | SVPDPQPIGEPPAAPSGVGSLTMASGGGAPVADNNEGADGVGNASGNWHCDSQWLGDRVI |
| | TTSTRTWALPTYNNHLYKQISSASTGATNDNTYFGYSTPWGYFDFNRFHCHFSPRDWQRL |
| | INNNWGFRPKRLNFKLFNIQVKEVTDNNGVKTIANNLTSTVQVFTDSDYQLPYVLGSAHE |
| | GCLPPFPADVFMIPQYGYLTLNDGSQAVGRSSFYCLEYFPSQMLRTGNNFQFSYEFENVP |
| | FHSSYAHSQSLDRLMNPLIDQYLYYLSKTINGSGQNQQTLKFSVAGPSNMAVQGRNYIPG |
| | PSYRQQRVSTTVTQNNNSEFAWPGASSWALNGRNSLMNPGPAMASHKEGEDRFFPLSGSL |
| | IFGKQGTGRDNVDADKVMITNEEEIKTTNPVATESYGQVATNHQGQSGRGDLGLSAQAAQ |
| | TGWVQNQGILPGMVWQDRDVYLQGPIWAKIPHTDGNFHPSPLMGGFGMKHPPPQILIKNT |
| | PVPADPPTAFNKDKLNSFITQYSTGQVSVEIEWELQKENSKRWNPEIQYTSNYYKSNNVE |
| | FAVNTEGVYSEPRPIGTRYLTRNL |
| 1269 | MAADGYLPDWLEDNLSEGIREWWALKPGAPQPKANQQHQDNARGLVLPGYKYLGPGNGLD |
| | KGEPVNAADAAALEHDKAYDQQLKAGDNPYLRYNHADAEFQERLQEDTSFGGNLGRAVFQ |
| | AKKRVLEPLGLVEEGAKTAPGKKRPVEPSPQRSPDSSTGIGKTGQQPAKKRLNFGQTGDT |
| | ESVPDPQPIGEPPAAPAAVGPTTMASGGGAPMADNNEGADGVGNASGNWHCDSTWLGDRV |
| | ITTSTRTWALPTYNNHLYKQISNGTSGGATNDNTYFGYSTPWGYFDFNRFHCHFSPRDWQ |
| | RLINNNWGFRPKRLNFKLFNIQVKEVTDNNGVKTIANNLTSTVQVFTDSDYQLPYVLGSA |
| | HEGCLPPFPADVFMIPQYGYLTLNDGSQAVGRSSFYCLEYFPSQMLRTGNNFQFSYEFEN |
| | VPFHSSYAHSQSLDRLMNPLIDQYLYYLSKTINGSGQNQQTLKFSVAGPSNMAVQGRNYI |
| | PGPSYRQQRVSTTVTQNNNSEFAWPGASSWALNGRNSLMNPGPAMASHKEGEDRFFPLSG |
| | SLIFGKQGTGRDNVDADKVMITNEEEIKTTNPVATESYGQVATNHQGQSGRGDLGLSAQA |
| | AQTGWVQNQGILPGMVWQDRDVYLQGPIWAKIPHTDGNFHPSPLMGGFGMKHPPPQILIK |
| | NTPVPADPPTAFNKDKLNSFITQYSTGQVSVEIEWELQKENSKRWNPEIQYTSNYYKSNN |
| | VEFAVNTEGVYSEPRPIGTRYLTRNL |
| 1270 | MAADGYLPDWLEDNLSEGIREWWALKPGAPQPKANQQHQDNARGLVLPGYKYLGPGNGLD |
| | KGEPVNAADAAALEHDKAYDQQLKAGDNPYLKYNHADAEFQERLKEDTSFGGNLGRAVFQ |
| | TKKRVLEPFGLVEEGAKTAPGKKRPVEQSPQEPDSSSGIVKTGQQPAKKRLNFGQTGDTE |
| | SVPDPQPLGEPPATPSGVGSLTMASGGGAPMADNNEGADGVGNASGNWHCDSTWLGDRVI |
| | TTSTRTWALPTYNNHLYKQISNGTSGGATNDNAYFGYSTPWGYFDFNRFHCHFSPRDWQR |
| | LINNNWGFRPKRLNFKLFNIQVKEVTDNNGVKTIANNLTSTVQVFTDSDYQLPYVLGSAH |
| | EGCLPPFPADVFMIPQYGYLTLNDGSQAVGRSSFYCLEYFPSQMLRTGNNFQFSYEFENV |
| | PFHSSYAHSQSLDRLMNPLIDQYLYYLSKTINGSGQNQQTLKFSVAGPSNMAVQGRNYIP |
| | GPSYRQQRVSTTVTQNNNSEFAWPGASSWALNGRNSLMNPGPAMASHKEGEDRFFPLSGS |
| | LIFGKQGTGRDNVDADKVMITNEEEIKTTNPVATESYGQVATNHQGQSGRGDLGLSAQAA |
| | QTGWVQNQGILPGMVWQDRDVYLQGPIWAKIPHTDGNFHPSPLMGGFGMKHPPPQILIKN |
| | TPVPADPPTAFNKDKLNSFITQYSTGQVSVEIEWELQKENSKRWNPEIQYTSNYYKSNNV |
| | EFAVNTEGVYSEPRPIGTRYLTRNL |
| 1271 | MAADGYLPDWLEDNLSEGIREWWDLKPGAPKPKANQQKQDDGRGLVLPGYKYLGPFNGLD |
| | KGEPVNAADAAALEHDKAYDQQLKAGDNPYLRYNHADAEFQERLQEDTSFGGNLGRAVFQ |
| | AKKRVLEPFGLVEEGAKTAPGKKRPVEQSPQEPDSSSGIGKTGQQPAKKRLNFGQTGDSE |
| | SVPDPQPLGEPPATPAAVGPTTMASGGGAPVADNNEGADGVGSSSGNWHCDSQWLGDRVI |
| | TTSTRTWALPTYNNHLYKQISNSTSGGSSNDNAYFGYSTPWGYFDFNRFHCHFSPRDWQR |
| | LINNNWGFRPKRLNFKLFNIQVKEVTDNNGVKTIANNLTSTVQVFTDSDYQLPYVLGSAH |
| | EGCLPPFPADVFMIPQYGYLTLNDGSQAVGRSSFYCLEYFPSQMLRTGNNFQFSYEFENV |
| | PFHSSYAHSQSLDRLMNPLIDQYLYYLSKTINGSGQNQQTLKFSVAGPSNMAVQGRNYIP |
| | GPSYRQQRVSTTVTQNNNSEFAWPGASSWALNGRNSLMNPGPAMASHKEGEDRFFPLSGS |
| | LIFGKQGTGRDNVDADKVMITNEEEIKTTNPVATESYGQVATNHQGQSGRGDLGLSAQAA |
| | QTGWVQNQGILPGMVWQDRDVYLQGPIWAKIPHTDGNFHPSPLMGGFGLKHPPPQILIKN |
| | TPVPADPPAEFSATKFASFITQYSTGQVSVEIEWELQKENSKRWNPEVQYTSNYAKSANV |
| | DFTVDNNGLYTEPRPIGTRYLTRPL |
| 1272 | MAADGYLPDWLEDNLSEGIREWWALKPGAPQPKANQQKQDDGRGLVLPGYKYLGPFNGLD |
| | KGEPVNEADAAALEHDKAYDQQLKAGDNPYLRYNHADAEFQERLQEDTSFGGNLGRAVFQ |
| | AKKRVLEPLGLVEEGAKTAPGKKRPVEPDSSSGIGKSGQQPAKKRLNFGQTGDSESVPDP |
| | QPLSEPPAGPSGLGSGTMAAGGGAPMADNNEGADGVGNVSGNWHCDSTWLGDRVITTSTR |
| | TWALPTYNNHLYKQISNGTSGGSSNDNTYFGYSTPWGYFDFNRFHCHFSPRDWQRLINNN |
| | WGFRPKKLNFKLFNIQVKEVTQNEGTKTIANNLTSTVQVFTDSEYQLPYVLGSAHQGCLP |
| | PFPADVFMIPQYGYLTLNNGSQAVGRSSFYCLEYFPSQMLRTGNNFTFSYTFEDVPFHSS |
| | YAHSQSLDRLMNPLIDQYLYYLSRTQTNGTNATQTLLFAQAGPQNMSAQAKNWLPGPCYR |
| | QQRVSTTVSQNNNSNFTWTGATKYHLNGRDSLVSPGVAMATHKDDEERFFPSSGVLMFGK |
| | QGAGKDNVEYTNVMLTSEEEIKTTNPVATEQYGVVADNLQQTNSAPIVGAVNSQGALPGM |
| | VWQNRDVYLQGPIWAKIPHTDGNFHPSPLMGGFGLKHPPPQILIKNTPVPADPPVNFTDA |
| | KLASFITQYSTGQVSVEIEWELQKENSKRWNPEIQYTSNYYKSANVDFAVNADGVYSEPR |
| | PIGTRYLTRNL |
| 1273 | MAADGYLPDWLEDNLSEGIREWWALKPGAPQPKANQQKQDDGRGLVLPGYKYLGPFNGLD |
| | KGEPVNEADAAALEHDKAYDQQLKAGDNPYLRYNHADAEFQERLQEDTSFGGNLGRAVFQ |
| | AKKRVLEPLGLVEEGAKTAPGKKRPVEPDSSSGIGKSGQQPAKKRLNFGPTGDSESVPDP |
| | QPLSEPPAGPSGLGSGTMAAGGGAPMADNNEGADGVGNVSGNWHCDSTWLGDRVITTSTR |
| | TWALPTYNNHLYKQISNGTSGGSSNDNTYFGYSTPWGYFDFNRFHCHFSPRDWQRLINNN |
| | WGFRPKKLNFKLFNIQVKEVTQNEGTKTTANNLTSTVQVFTDSEYQLPYVLGSAHQGCLP |
| | PFPADVFMIPQYGYLTLNNGSQAVGRSSFYCLEYFPSQMLRTGNNFTFSYTFEDVPFHSS |
| | YAHSQSLDRLMNPLIDQYLYYLSRTQTNGTNATQTLLFAQAGPQNMSAQAKNWLPGPCYR |
| | QQRVSTAVSQNNNSNFTWTGATKYHLNGRDSLVNPGVAMATHKDDEERFFPSSGVLMFGK |
| | QGAGKDNVEYTNVMLTSEEEIKTTNPVATEQYGVVADNLQQTNSAPIVGAVNSQGALPGM |
| | VWQNRDVYLQGPIWAKIPHTDGNFHPSPLMGGFGLKHPPPQILIKNTPVPADPPVNFTDA |
| | KLASFITQYSTGQVSVEIEWELQKENSKRWNPEIQYTSNYYKSANVDFAVNADGVYSEPR |
| | PIGTRYLTRNL |
| 1274 | MAADGYLPDWLEDNLSEGIREWWALKPGAPQPKANQQKQDDGRGLVLPGYKYLGPFNGLD |
| | KGEPVNEADAAALEHDKAYDQQLKAGDNPYLRYNHADAEFQERLQEDTSFGGNLGRAVFQ |
| | AKKRVLEPLGLVEEGAKTAPGKKRPVEPDSSSGIGKSGRQPAKKRLNFGQTGDSESVPDP |
| | QPLSEPPAGPSGLGSGTMAAGGGAPMADNNEGADGVGNASGNWHCDSTWLGDRVITTSTR |
| | TWALPTYNNHLYKQISNGTSGGSSNDNTYFGYSTPWGYFDFNRFHCHFSPRDWQRLINNN |
| | WGFRPKRLNFKLFNIQVKEVTQNEGTKTIANNLTSTVQVFTDSKYQLPYVLGSAHQGCLP |
| | PFPADVFMIPQYGYLTLNNGSQAVGRSSFYCLEYFPSQMLRTGNNFTFSYTFEDVPFHSS |
| | YAHSQSLDRLMNPLIDQYLYYLSRTQTNGTNATQTLLFAQAGPQNMSAQAKNWLPGPCYR |
| | QQRVSTTVSQNNNSNFTWTGATKYHLNGRDSLVNPGVAMATHKDDEERFFPSSGVLMFGK |
| | QGAGKDNVEYTNVMLTSEEEIKTTNPVATEQYGVVADNLQQTNSAPIVGAVNSQGALPGM |
| | VWQNRDVYLQGPIWAKIPHTDGNFHPSPLMGGFGLKHPPPQILIKNTPVPADPPVNFTDA |
| | KLASFITQYSTGQVSVEIEWELQKENSKRWNPEIQYTSNYYKSANVDFAVNADGVYSEPR |
| | PIGTRYLTRNL |
| 1275 | MAADGYLPDWLEDNLSEGIREWWDLKPGAPKPKANQQKQDDGRGLVLPGYKYLGPFNGLD |
| | KGEPVNAADAAALEHDKAYDQQLKAGDNPYLRYNHADAEFQERLQEDTSFGGNLGRAVFQ |
| | AKKRVLEPLGLVEEGAKTAPGKKRPVEPSPQRSPDSSTGIGKKGQQPARKRLNFGQTGDS |
| | ESVPDPQPIGEPPAAPSSVGSGTMAAGGGAPMADNNEGADGVGSSSGNWHCDSTWLGDRV |
| | ITTSTRTWALPTYNNHLYKQISNGTSGGSTNDNTYFGYSTPWGYFDFNRFHCHFSPRDWQ |
| | RLINNNWGFRPKRLSFKLFNIQVKEVTQNEGTKTIANSLTSTIQVFTDSEYQLPYVLGSA |
| | HQGCLPPFPADVFMIPQYGYLTPNNGSQAVGRSSFYCLEYFPSQMLRTGNNFSFSYTFED |
| | VPFHSSYAHSQSLDRLMNPLIDQYLYYLSRTQSTGGTAGTQQLLSSQAGPSNMSAQARNW |
| | LPGPCYRQQRVSTTLSQNNNSNFAWTGATKYHLNGRDSLVNPGVAMATNKDDEDRFFPSS |
| | GILMFGKQGAGKDNVDYSNVMLTSEEEIKTTNPVATEQYGVVADNLQQQNTAPIVGAVNS |
| | QGALPGMVWQNRDVYLQGPIWAKIPHTDGNFHPSPLMGGFGLKHPPPQILIKNTPVPADP |
| | PTAFNQAKLNSFITQYSTGQVSVEIEWELQKENSKRWNPEIQYTSNYYKSTNVDFAVNTE |
| | GVYSEPRPIGTRYLTRNL |
| 1276 | MAADGYLPDWLEDNLSEGIREWWDLKPGAPKPKANQQKQDDGRGLVLPGYKYLGPFNGLD |
| | KGEPVNAADAAALEHDKAYDQQLKAGDNPYLRYNHADAEFQERLQEDTSFGGNLGRAVFQ |
| | AKKRVLEPLGLVEEGAKTAPGKKRPVEPSPQRSPDSSTGIGKKGQQPARKRLNFGQTGDS |
| | ESVPDPQPIGEPPAAPSSVGSGTMAAGGGAPMADNNEGADGVGSSSGNWHCDSTWLGDRV |
| | ITTSTRTWALPTYNNHLYKQISNGTSGGSTNDNTYFGYSTPWGYFDFNRFHCHFSPRDWQ |
| | RLINNNWGFRPKRLSFKLFNIQVKEVTQNEGTKTIANNLTSTIQVFTDSEYQLPYVLGSA |
| | HQGCLPPFPADVFMIPQYGYLTLNNGSQAVGRSSFYCLEYFPSQMLRTGNNFSFSYTFED |
| | VPFHSSYVHSQSLDRLMNPLIDQYLYYLSRTQSTGGTAGTQQLLFSQAGPSNMSAQARNW |
| | LPGPCYRQQRVSTTLSQNNNSNFAWTGATKYHLNGRDSLVNSGVAMATNKDDEDRFFPSS |
| | GILMFGKQGAGKDNVDYSNVMLTSEEEIKTTNPVATEQYGVVADNLQQQNTAPIVGAVNS |
| | QGALPGMVWQNRDVYLQGPIWAKIPHTDGNFHPSPLMGGFGLKHPPPQILIKNTPVPADP |
| | PTAFNQAKLNSFITQYSTGQVSVEIEWELQKENSKRWNPEIQYTSNYYKSTNVDFAVNTE |
| | GVYSEPRPIGTRYPTRNL |
| 1277 | MAADGYLPDWLEDNLSEGIREWWDLKPGAPKPKANQQKQDDGRGLVLPGYKYLGPFNGLD |
| | KGEPVNAADAAALEHDKAYDQQLKAGDNPYLRYNHADAEFQERLQEDTSFGGNLGRAVFQ |
| | AKKRVLEPLGLVEEGAKTAPGKKRPVEPSPQRSPDSSTGIGKKGQQPARKRLNFGQTGDS |
| | ESVPDPQPIGEPPAAPSSVGSGTMAAGGGAPMADNNEGADGVGSSSGNWHCDSTWLGDRV |
| | ITTSTRTWALPAYNNHLYKQISNGTSGGSTNDNTYFGYSTPWGYFDFNRFHCHFSPRDWQ |
| | RLINNNWGFRPKRLSFKLFNIQVKEVTQNEGTKTIANNLTSTIQVFTDSEYQLPYVLGSA |
| | HQGCLPPFPADVFMIPQYGYLTLNNGSQAVGRSSFYCLEYFPSQMLRTGNNFSFSYTFED |
| | VPFHSSYAHSQSLDRLMNPLIDQYLYYLSRTQSTGGTAGTQQLLFSQAGPSNMSAQARNW |
| | LPGPCYRQQRVSTTLSQNNNSNFAWTGATKYHLSGRDSLVNPGVAMATNKDDEDRFFPSS |
| | GILMFGKQGAGKDNVDYSNVMLTSEEEIKTTNPVATEQYGVVADNLQQQNTAPIVGAVNS |
| | QGALPGMVWQNRDVYLQGPIWAKIPHTDGNFHPSPLMGGFGLKHPPPQILIKNTPVPADP |
| | PTAFNQAKLNSSITQYSTGQVSVEIEWELQKENSKRWNPEIQYTSNYYKSTNVDFAVNTE |
| | GVYSEPRPIGTRYLTRNL |
| 1278 | MAADGYLPDWLEDNLSEGIREWWDLKPGAPKPKANQQKQDDGRGLVLPGYKYLGPFNGLD |
| | KGEPVNAADAAALEHDKAYDQQLKAGDNPYLRYNHADAEFQERLQEDTSFGGNLGRAVFQ |
| | AKKRVLEPLGLVEEGAKTAPGKKRPVEPSPQRSPDSSTGIGKKGQQPARKRLNFGQTGDS |
| | ESVPDPQPIGEPPAAPSSVGSGTMAAGGGAPMADNNEGADGVGSSSGNWHCDSTWLGDRV |
| | ITTSTRTWALPTYNNHLYKQISNGTSGGSTNDNTYFGYSTPWGYFDFNRFHCHFSPRDWQ |
| | RLINNNWGFRPKRLSFKLFNIQVKEVTQNEGTKTIANNLTSTIQVFTDSEYQLPYVLGSA |
| | HQGCLPPFPADVFMIPQYGYLTLNNGSQAVGRSSFYCLEYFPSQMLRTGNNFSFSYTFED |
| | VPFHSSYAHSQSLDRLMNPLIDQYLYYLSRTQSTGGTAGTQQLLFSQAGPSNMSAQARNW |
| | LPGPCYRQQRVSTTLSQNNNSNFAWTGATKYHLNGRDSLVNPGVAMATNKDDEDRFFPSS |
| | GILMFGKQGAGKDNVDYSNVMLTSEEEIKTTNPVATEQYGVVADNLQQQNTAPIVGAVNS |
| | QGALPGMVWQNRDVYLQGPIWAKIPHTDGNFHPSPLMGGFGLKHPPPQILIKNTPVPADP |
| | PTAFNQAKLNSFITQYSTGQVSVEIVWELQKENSKRRNPEIQYTSNYYKSTNVDFAVNTE |
| | GVYSEPRPIGTRYLTRNL |
| 1279 | MAADGYLPDWLEDNLSEGIREWWDLKPGAPKPKANQQKQDDGRGLVLPGYKYLGPFNGLD |
| | KGEPVNAADAAALEHDKAYDQQLKAGDNPYLRYNHADAEFQERLQEDTSFGGNLGRAVFQ |
| | AKKRVLEPLGLVEEGAKTAPGKKRPVEPSPQRSPDSSTGIGKKGQQPARKRLNFGQTGDS |
| | ESVPDPQPIGEPPAAPSSVGSGTMAAGGGAPMADNNEGADGVGSSSGNWHCDSTWLGDRV |
| | ITTSTRTWALPTYNNHLYKQISNGTSGGSTNDNTYFGYSTPWGYFDFNRFHCHFSPRDWQ |
| | RLINNNWGFRPKRLSFKLFNIQVKEVTQNEGTKTIANNLTSTIQVFTDSEYQLPYVLGSA |
| | HQGCLPPFPADVFMIPQYGYLTLNNGSQAVGRSSFYCLEYFPSQMLRTGNNFSFSYTFED |
| | VPFHSSYAHSQSLDRLMNPLIDQYLYYLSRTQSTGGTAGTQQLLFSQAGPSNMSAQARNW |
| | LPGPCYRQQRVSTTLSQNNNSNFAWTGATKYHLNGRDSLVNPGVAMATNKDDEDRFFPPS |
| | GILMFGKQGAGKDNVDYSNVMLTSEEEIKTTNPVATEQYGVVADNLQQQNTAPIVGAVNS |
| | QGALPGMVWQNRDVYLQGPIWAKIPHTDGNFHPSPLMGGFGLKHPPPQILIKNTPVPADP |
| | PTAFNQAKLNSFITQYSTGQVSVVIEWELQKENSKRWNPEIQYTSNYYKSTNVDFAVNTE |
| | GVYSELRPIGTRYLTRNL |
| 1280 | MAADGYLPDWLEDNLSEGIREWWDLKPGAPKPKANQQKQDDGRGLVLPGYKYLGPFNGLD |
| | KGEPVNAADAAALEHDKAYDQQLKAGDNPYLRYNHADAEFQERLQEDTSFGGNLGRAVFQ |
| | AKKRVLEPLGLVEEGAKTAPGKKRPVEPSPQRSPDSSTGIGKKGQQPARKRLNFGQTGDS |
| | ESVPDPQPIGEPPAAPSSVGSGTMAAGGGAPMADNNEGADGVGSSSGNWHCDSTWLGDRV |
| | ITTSTRTWALPTYNNHLYKQISNGTSGGSTNDNTYFGYSTPWGYFDFNRFHCHFSPRDWQ |
| | RLINNNWGFRPKRLSFKLFNIQVKEVTQNEGTKTIANNLTSTIQVFTDSEYQLPYVLGSA |
| | HQGCLPPFPADVFMIPQYGYLTLNNGSQAVGRSSFYCLEYFPSQMLRTGNNFSFSYTFED |
| | VPFHSSYAHSQSLDRLMNPLIDQYLYYLSRTQSTGGTAGTQQLLFSQAGPSNMSAQARNW |
| | LPGPCYRQQRVSTTLSQNNNSNFAWTGATKYHLNGRDSLVNPGVAMATNKDDEDRFFPSS |
| | GILMFGKQGAGKDNVDYSNVMLTSEEEIKATNPVATEQYGVVADNLQQQNTAPIVGAVNS |
| | QGALPGMVWQNRDVYLQGPIWAKIPHTDGNFHPSPLMGGFGLKHPPPQILIKNTPVPADP |
| | PTAFNQAKLNSFITQYSTGQVSVEIEWELQKENSKRWNPEIQYTSNYYKSTNVDFAVNTE |
| | GVYSEPRPIGTRYLTRNL |
| 1281 | MAADGYLPDWLEDNLSEGIREWWDLKPGAPKPKANQQKQDDGRGLVLPGYKYLGPFNGLD |
| | KGEPVNAADAAALEHDKAYDQQLKAGDNPYLRYNHADAEFQERLQEDTSFGGNLGRAVFQ |
| | AKKRVLEPLGLVEEGAKTAPGKKRPVEPSPQRSPDSSTGIGKKGQQPARKRLNFGRTGDS |
| | ESVPDPQPIGEPPAAPSSVGSGTMAAGGGAPMADNNEGADGVGSSSGNWHCDSTWLGDRV |
| | ITTSTRTWALPTYNNHLYKQISNGTSGGSTNDNTYFGYSTPWGYLDFNRFHCHFSPRDWQ |
| | RLINNNWGFRPKRLSFKLFNIQVKEVTQNEGTKTIANNLASTIQVFTDSEYQPPYVLGSA |
| | HQGCLPPFPADVFMIPQYGYLTLNNGSQAVGRSSFYCLEYFPSQMLRTGNNFSFSYTFED |
| | VPFHSSYAHSQSLDRLMNPLIDQYLYYLSRTQSTGGTAGTQQLLFSRAGPSNMSAQARNW |
| | LPGPCYRQQRVSTTLSQNNNSNFAWTGATKYHLNGRDSLVNPGVAMATNKDDEDRFFPSS |
| | GILMFGKQGAGKDNVDYSNVMLTSEEEIKTTNPVATEQYGVVADNLQQQNTAPTVGAVNS |
| | QGALPGMVWQNRDVYLQGPIWAKIPHTDGNFHPSPLMGGFGLKHPPPQILIKNTPVPADP |
| | PTAFNQAKLNSFIAQYSTGQVSVEIEWELQKENSKRWNPEIQYTSNYYKSTNADFAVNTE |
| | GVYSEPRPIGTRYLTRNL |
| 1282 | MAADGYLPDWLEDNLSEGIREWWDLKPGAPKPKANQQKQDDGRGLVLPGYKYLGPFNGLD |
| | KGEPVNAADAAALEHDKAYDQQLKAGDNPHLRYNHADAEFQERLQEDTSFGGNLGRAVFQ |
| | AKKRVLEPLGLVEEGAKTAPGKKRPVEPSPQRSPDSSTGIGKKGQQPARKRLNFGQTGDS |
| | ESVPDPQLIGEPPAAPSSVGSGTMAAGGGAPMADNNEGADGVGSSSGNWHCDSTWLGDRV |
| | ITTSTRTWALPTYNNHLYKQISNGTSGGSTNDNTYFGYSTPWGYFDFNRFHCHFSPRDWQ |
| | RLINNNWGFRPKRLSFKLFNIQVKEVTQNEGTKTIANNLTSTIQVFTDSEYQLPYVLGSA |
| | HQGCLPPFPADVFMIPQYGNLTLNNGSQAVGRSSFYCLEYFPSQMLRTGNNFSFSYTFED |
| | VPFHSSYAHSQSLDRLMNPLIDQYLYYLSRTQSTGGTAGTQQLLFSQAGPSNMSAQARNW |
| | LPGPCYRQQRVSTTLSQNNNSNFAWTGATKYHLNGRDSLVNPGVAMATNKDDEDRFFPSS |
| | GILMFGKQGAGKDNMGYSNVMLTSEEEIKTTNPVATEQYGVVADNLQQQNTAPIVGAVNS |
| | QGALPGMVWQNRDVYLQGPIWAKIPHTDGNFHPSPLMGGFGLKHPPPQILIKNTPVPADP |
| | PTAFNQAKLNSFITQYGTGQVSVEIEWELQKENSKRWNPEIQYTSNYYKSTNVDFAVNTE |
| | GVYSEPRPIGTRYLTRNL |
| 1283 | MVADGYLPDWLEDNLSEGIREWWDLKPGAPKPKANQQKQGDGRGLVLPGYKYLGPFNGLD |
| | KGEPVNAADAAALEHDKAYDQQLKAGDNPYLRYNHADAELQERLQEDTSFGGNLGRAVFQ |
| | AKKRVLEPLGLVEEGAKTAPGKKRPVEPSPQRSPDSSTGIGKKGQQPARKRLNFGQTGDS |
| | ESVPDPQPIGEPPAAPSSVGSGTMAAGGGAPMADNNEGADGVGSSSGNWHCDSTWLGDRV |
| | ITTSTRTWALPTYNNHLYKQISNGTSGGSTNDNTYFGYSTPWGYFDFNRFHCHFSPRDWQ |
| | RLINNNWGFRPKRLSFKLFNIQVKEVTQNEGTKTIANNLTSTIQVFTDSEYQLPYVLGSA |
| | HQGCQPPFPADVFMIPQYGYLTLNNGSQAVGRSSFYCLEYFPSQMLRTGNNFSFSYTFED |
| | VPFHSSYAHSQSLDRLMNPLIDQYLYYLSRTQSTGGTAGTQQLLFSQAGPSNMSAQARNW |
| | LPGPCYRQQRVSTTLSQNNNSNFAWTGATKYHLNGRDSLVNPGVAMATNKDDEDRFFPSS |
| | GILMFGKQGAGKDNVDYSNVMLTSEEEIKTTNPVATEQYGVVADNLQQQNTAPIVGAVNS |
| | QGALPGMVWQNRDVYLQGPIWAKIPHTDGNFHPSPLMGGFGLKHPPPQILIKNTPVPADP |
| | PTAFNQAKLNSFITQYSTGQVSVEIEWEPQKENSKRWNPEIQYTSNYYKSTNVDFAVNTE |
| | GVYSEPRPIGTRYLTRNL |
| 1284 | MAADGYLPDWLEDNLSEGIREWWALKPGAPKPKANQQKQDDGRGLVLPGYKYLGPFNGLD |
| | KGEPVNAADAAALEHDKAYDQQLQAGDNPYLRYNHADAEFQERLQEDTSFGGNLGRAVFQ |
| | AKKRVLEPLGLVEEGAKTAPGKKRPVEPSPQRSPDSSTGIGKKGQQPARKRLNFGQTGDS |
| | ESVPDPQPIGEPPAAPSSVGSGTMAAGGGAPMADNNEGADGVGSSSGNWHCDSTWLGDRV |
| | ITTSTRTWALPTYNNHLYKQTSNGTSGGSTNDNTYFGYSTPWGYFDFNRFHCHFSPRDWQ |
| | RLINNNWGFRPKRLSFKLFNIQVKEVTQNEGTKTIANNLTSTIQVFTDSEYQLPYVLGSA |
| | HQGCLPPFPADVFMIPQYGYLTLNNGSQAVGRSSFYCLEYFPSQMLRTGNNFSFSYTFED |
| | VPFHSSYAHSQSLDRLMNPLIDQYLYYLSRTQSTGGTAGTQQLLFSQAGPSNMSAQARNW |
| | LPGPCYRQQRVSTTLSQNNNSNFAWTGATKYHLNGRDSLVNPGVAMATNKDDEDRFFPSS |
| | GILMFGKQGAGKDNVDYSNVMLTSEEEIKTTNPVATEQYGVVADNLQQQNTAPIVGAVNS |
| | QGALPGMVWQNRDVYLQGPIWAKIPHTDGNFHPSPLMGGFGLKHPPPQILIKNTPVPADP |
| | PTAFNQAKLNSFITQYSTGQVSAEIEWELQKENSKRWNPEIQYTSNYYKSTNVDFAVNTE |
| | GVYSEPRPIGTRYLTRNL |
| 1285 | MAADGYLPDWLEDNLSEGIREWWDLKPGAPKPKANQQKQDDGRGLVLPGYKYLGPFNGLD |
| | KGEPVNAADAAALEHDKAYDQQLKAGDNPYLRYNHADAEFQERLQEDTSFGGNLGRAVFQ |
| | AKKRVLEPLGLVEEAAKTAPGKKRPVEPSPQRSPDSSTGIGKKGQQPARKRLNFGQTGDS |
| | ESVPDPQPIGEPPAAPSSVGSGTMAAGGGAPMADNNEGADGVGSSSGNWHCDSTWLGDRV |
| | ITTSTRTWALPTYNNHLYKQISNGTSGGSTNDNTYFGYSTPWGYFDFNRFHCHFSPRDWQ |
| | RLINNNWGFRPKRLSFKLFNIQVKEVTQNEGTKTIANNLTSTIQVFTDSEYQLPYVLGSA |
| | HQGCLPPFPADVFMIPQYGYLTLNNGSQAVGRSSFYCLEYFPSQMLRTGNNFSFSYTFED |
| | VPFHSSYAHSQSLDRLMNPLIDQYLYYLSRTQSTGGTAGTQQLLFSQAGPSNMSAQARNW |
| | LPGPCYRQQRVSTTLSQNNNSNFAWTGATKYHLNGRDSLVNPGVAMATNKDDEDRFFPSS |
| | GILMFGKQGAGKDNVDYSNVMLTSEEEIKTTNPVATEQYGVVADNLQQQNTAPIVGAVNS |
| | QGALPGMVWQNRDVYLQGPIWAKIPHTDGNFHPSPLMGGFGLKHPPPQILIKSTPVPADP |
| | PTAFNQAKLNSFITQYSTGQVSVEIEWELQKENSKCWNPEIQYTSNYYKSTNVDFAVNTE |
| | GVYSEPRPIGTRYLTRNL |
| 1286 | MAADGYLPDWLEDNLSEGIREWWDLKPGAPKPKANQQKQDDGRGLVLPGYKYLGPFNGLD |
| | KGEPVNAADAAALEHDKAYDQQLKAGDNPYLRYNHADAEFQERLQEDTSFGGNLGRAVFQ |
| | AKKRVLEPLGLVEEGAKTAPGKKRPVEPSPQRSPDSSTGIGKKGQQPARKRLNFGQTGDS |
| | ESVPDPQPIGEPPAAPSSVGSGTMAAGGGAPMADNNEGADGVGSSSGNWHCDSTWLGDRV |
| | ITTSTRTWALPTYNNHLYKQISNGTSGGSTNDNTYFGYSTPWGYFDFNRFHCHFSPRDWQ |
| | RPINNNWGFRPKRLSFKLFNIQVKEVTQNEGTKTIANNLTSTIQVFTDSEYQLPYVLGSA |
| | HQGCLPPFPADVFMIPQYGYLTLNNGSQAVGRSSFYCLEYFPSQMLRTGNNFSFSYPFED |
| | VPFHSSYAHSQSLDRLMNPLIDQYLYYLSRTQSTGGTAGTQQLLFSQAGPSNMSAQARNW |
| | LPGPCYRQQRVSTTLSQNNNSNFAWTGATKYHLNGRDSLVNPGVAMATNKDDEDRFFPSS |
| | GILMFGKQGAGKDNVDYSNVMLTSEEEIKTTNPVATEQYGVVADNLQQQDTAPIVGAVNS |
| | QGALPGMVWQNRDVYLQGPIWAKIPHTDGNFHPSPLMGGFGLKHPPPQVLIKNTPVPADP |
| | PTAFNQAKLNSFITQYSTGQVSVEIEWELQKENSKRWNPEIQYTSNYYKSTNVDFAVNTE |
| | GVYSEPRPIGTRYLTRNL |
| 1287 | MAADGYLPDWLEDNLSEGIREWWDLKPGAPKPKANQQKQDDGRGLVLPGYKYLGPFNGLD |
| | KGEPVNAADAAALEHDKAYDQQLKAGDNPYLRYNHADAEFQERLQEDTSFGGNLGRAVFQ |
| | AKKRVLEPLGLVEEGAKTAPGKKRPVEPSPQRSPDSSTGIGKKGQQPAGKRLNFGQTGDS |
| | ESVPDPQPIGEPPAAPSSVGSGTMAAGGGAPMADNNEGADGVGSSSGNWHCDSTWLGDRV |
| | ITTSTRTWALPTYNNHLYKQISNGTSGGSTNDNTYFGYSTPWGYFDFNRFHCHFSPRDWQ |
| | RLINNNWGFRPKRLSFKLFNIQVKEVTQNEGTKTIANNLTSTIQVFTDSEYQLPYVLGSA |
| | HQGCLPPFPADVFMIPQYGYLTLNNGSQAVGRSSFYCLEYFPSQMLRTGNNFSFSYTFED |
| | VPFHSSYAHSQSLDRLMNPLVDQYLYYLSRTQSTGGTAGTQQLLFSQAGPSNMSAQARNW |
| | LPGPCYRQQRVSTTLSQNNNSNFAWTGATKYHLNGRDSLVNPGVAMATNKDDEDRFFPSS |
| | GILMFGKQGAGKDNVDYSNVMLTSEEEIKTTNPVATEQYGVVADNLQQQNTAPIVGAVNS |
| | QGALPGMVWQNRDVYLQGPIWAKIPHTDGNFHPSPLMGGFGLKHPPPQILIKNTPVPADP |
| | PTAFNQAKLNSFITQYSTGQVSVEIEWELQKENSKRWSPEIQYTSNYYKSTNVDFAVNTE |
| | GVYSEPRPIGTRYLTRNL |
| 1288 | MAADGYLPDWLEDNLSEGIREWWDLKPGAPKPKANQQKQDDGRGLVLPGYKYLGPFNGLD |
| | KGEPVNAADAAALEHDKAYDQQLKAGDNPYLRYNHADAEFQERLQEDTSFGGNLGRAVFQ |
| | AKKRVLEPLGLVEEAAKTAPGKKRPVEPSPQRSPDSSTGIGKKGQQPARKRLNFGQTGDS |
| | ESVPDPQPIGEPPAGPSGLGSGTMAAGGGAPMADNNEGADGVGNASGNWHCDSTWLGDRV |
| | ITTSTRTWALPTYNNHLYKQISSQSAGSTNDNVYFGYSTPWGYFDFNRFHCHFSPRDWQR |
| | LINNNWGFRPKKLNFKLFNIQVKEVTTNDGVTTIANNLTSTVQVFSDSEYQLPYVLGSAH |
| | QGCLPPFPADVFMIPQYGYLTLNNGSQAVGRSSFYCLEYFPSQMLRTGNNFSFSYTFEDV |
| | PFHSSYAHSQSLDRLMNPLIDQYLYYLSRTQSTGGTAGTQQLLFSQAGPSNMSTQARNWL |
| | PGPCYRQQRVSTTLSQNNNSNFAWTGATKYHLNGRDSLVNPGVAMATNKDDEDRFFPSSG |
| | ILMFGKQGAGKDNVDYSNVMLTSEEEIKTTNPVATEQYGVVADNLQQQNTAPIVGAVNSQ |
| | GALPGMVWQNRDVYLQGPIWAKIPHTDGNFHPSPLMGGFGLKHPPPQILIKNTPVPADPP |
| | TAFNQAKLNSFITQYSTGQVSVEIEWELQKENSKRWNPEIQYTSNYYKSTNVDFAVNTEG |
| | AYSEPRPIGTRYLTRN |
| 1289 | MAADGYLPDWLEDNLSEGIREWWDLKPGAPKPKANQQKQDDGRGLVLPGYKYLGPFNGLD |
| | KGEPVNAADAAALEHDKAYDQQLKAGDNPYLRYNHADAEFQERLQEDTSFGGNLGRAVFQ |
| | AKKRVLEPLGLVEEAAKTAPGKKRPVEPSPQRSPDSSTGIGKKGQQPARKRLNFGQTGDS |
| | ESVPDPQPIGEPPAGPSGLGSGTMAAGGGAPMADNNEGADGVGNASGNWHCDSTWLGDRV |
| | ITTSTRTWALPTYNNHLYKQISSQSAGSTNDNVYFGYSTPWGYFDFNRFHCHFSPRDWQR |
| | LINNNWGFRPKKLNFKLFNIQVKEVTTNDGVTTIANNPTSTVQVFSDSEYQLPYVLGSAH |
| | QGCLPPFPADVFMIPQYGYLTLNNGSQSVGRSSFYCLEYFPSQMLRTGNNFTFSYTFEDV |
| | PFHSSYAHSQSLDRLMNPLIDQYLYYLARTQSNAGGTAGNRELQFYQGGPTTMAEQAKNW |
| | LPGPCYRQQRVSTTLSQNNNSNFAWTGATKYHLNGRDSLVNPGVAMATNKDDEDRFFPSS |
| | GILMFGKQGAGKDNVDYSNVMLTSEEEIKTTNPVATEQYGVVADNLQQQNTAPIVGAVNS |
| | QGALPGMVWQNRDVYLQGPIWAKIPHTDGNFHPSPLMGGFGLKHPPPQILIKNTPVPADP |
| | PTAFNQAKLNSFITQYSTGQVSVEIEWELQKENSKRWNPEIQYTSNYYKSTNVDFAVNTE |
| | GVYSEPRPIGTRYLTRNL |
| 1290 | MAADGYLPDWLEDNLSEGIREWWDLKPGAPKPKANQQKQDDGRGLVLPGYKYLGPFNGLD |
| | KGEPVSAADAAALEHDKACDQRLKAGDNPYLRYNHADAEFQERLQEDTSFGGNLGRAVFQ |
| | AKKRVLEPLGLVEEAAKTAPGKKGPVEPSPQRSPDSSTGIGKKGQQPARKRLNFGQTGDS |
| | ESVPDPQPIGEPPAGPSGLGSGTMAAGGGAPMADNNEGADGVGNASGNWHCDSTWLGDRV |
| | ITTSTRTWALPTYNNHLYKQISSQSAGSTNDNVYFGYSTPWGYFDFNRFHCHFSPRDWQR |
| | LINNNWGFRPKKLNFKLFNIQVKEVTTNDGVTTIANNLTSTVQVFSDSEYQLPYVLGSAH |
| | QGCLPPFPADVFMIPQYGYLTLNNGSQSVGRSSFYCLEYFPSQMLRTGNNFTFSYTFEDV |
| | PFHSSYAHSQSLDRLMNPLIDQYLYYLARTQSNAGGTAGNRELQFYQGGPTTMAEQAKNW |
| | LPGPCFRQQRVSKTLDQNNNSNFAWTGATKYHLNGRNSLVNPGVAMATHKDDEERFFPSS |
| | GVLIFGKTGAANKTTLENVLMTNEEEIRPTNPVATEEYGTVSSNLQAANTAAQTQVVNNQ |
| | GALPGMVWQNRDVYLQGPIWAKIPHTDGNFHPSPLMGGFGLKHPPPQILIKNTPVPANPP |
| | EVFTPAKFASFITQYSTGQVSVEIEWELQKENSKRWNPEIQYTSNFDEQTGVDFAVDSQG |
| | VYSEPRPIGTRYLTRNL |
| 1291 | MAADGYLPDWLEDNLSEGIREWWDLKPGAPKPKANQQKQDDGRGLVLPGYKYLGPFNGLD |
| | KGEPVNAADAAALEHDKAYDQQLKAGDNPYLRYNHADAEFQERLQEDTSFGGNLGRAVFQ |
| | AKKRVLEPLGLVEEAAKTAPGKKRPVEPSPQRSPDSSTGIGKKGQQPARKRLNFGQTGDS |
| | ESVPDPQPIGEPPAGPSGLGSGTMAAGGGAPMADNNEGADGVGNASGNWHCDSTWLGDRV |
| | ITTSTRTWALPTYNNHLYKQISSQSAGSTNDNVYFGYSTPWGYFDFNRFHCHFSPRDWQR |
| | LINNNWGFRPKKLNFKLFNIQVKEVTTNDGVTTIANNLTSTVQVFSDSEYQLPYVLGSAH |
| | QGCLPPFPADVFMIPQYGYLTLNNGSQSVGRSSFYCLEYFPSQMLRTGNNFTFSYTFEDV |
| | PFHSSYAHSQSLDRLMNPLIDQYLYYLARTQSNAGGTAGNRELQFYQGGPTTMAEQAKNW |
| | LPRPCFRQQRVSKTLDQNNNSNFAWTGATKYHLNGRNSLVNPGVAMATHKDDEERFFPSS |
| | GVLIFGKTGAANKTTLENVLMTNEEEIRPTNPVATEEYGTVSSNLQAANTAAQTQVVNNQ |
| | GALPGMVWQNRDVYLQGPIWAKIPHTDGNFHPSPLMGGFGLKHPPPQILIKNTPVPANPP |
| | EVFTPAKFASFITQYSTGQVSVEIEWELQKENSKRWNPEIQYTSNFDKQTGVDFAVDSQG |
| | VYSEPRPIGTRYLTRNL |
| 1292 | MAADGYLPDWLEDNLSEGIREWWDLKPGAPKPKANQQKQDDGRGLVLPGYKYLGPFNGLD |
| | KGEPVNAADAAALEHDKAYDQQLKAGDNPYLRYNHADAEFQERLQEDTSFGGNLGRAVLQ |
| | AKKRVLEPLGLVEEAAKTAPGKKRPVEPSPQRSPDSSTGIGKKGQQPARKRLNFGQTGDS |
| | ESVPDPQPIGEPPAGPSGLGSGTMAAGGGAPMADNNEGADGVGNASGNWHCDSTWLGDRV |
| | ITTSTRTWALPTYNNHLYKQISSQSAGSTNDNVYFGYSTPWGYFDFNRFHCHFSPRDWQR |
| | LINNNWGFRPKKLNFKLFNIQVKEVTTNDGVTTIANNLTSTVQVFSDSEYQLPYVLGSAH |
| | QGCLPPFPADVFMIPQYGYLTLNNGSQSVGRSSFYCLEYFPSQMLRTGNNFTFSYTFEDV |
| | PFHSSYAHSQSLDRLMNPLIDQYLYYLARTQSNAGGTAGNRELQFYQGGPTTMAEQAKNW |
| | LPGPCFRQQRVSKTLDQNNNSNFAWTGATKYHLNGRNSLVNPGVAMATHKDDEERFFPSS |
| | GVLIFGKTGAANKTTLENVLMTNEEEIRPTNPVATEEYGTVSSNLQAANTAAQTQVVNNQ |
| | GALPGMVWQNRDVYLQGPIWAKIPHTDGNFHPSPLMGGFGLKHPPPQILIKNTPVPANPP |
| | EVFTPAKFASFITQYSTGQVSVEIEWELQKENSKRWNPEIQYTSNFDKQTGVDFAVDSQG |
| | VYSEPRPIGTRYLTRNL |
| 1293 | MAADGYLPDWLEDNLSEGIREWWDLKPGAPKPKANQQKQDDGRGLVLPGYKYLGPFNGLD |
| | KGEPVNAADAAALEHDKAYDQQLKAGDNPYLRYNHADAEFQERLQEDTSFGGNLGRAVFQ |
| | AKKRVLEPLGLAEEAAKTAPGKKRPVEPSPQRSPDSSTGIGKKGQQPARKRLNFGQTGDS |
| | ESVPDPQPIGEPPAGPSGLGSGTMAAGGGAPMADNNKGADGVGNASGNWHCDSTWLGDRV |
| | ITTSTRTWALPTYNNHLYKQISSQSAGSTNDNVYFGYSTPWGYFDFNRFHCHFSPRDWQR |
| | LINNNWGFRPKKLNFKLFNIQVKEVTTGDGVTTIANNLTSTVQVFSDSEYQLPYVLGSAH |
| | QGCLPPFPADVFMIPQYGYLTLNNDSQSVGRSSFYCLEYFPSQMLRTGNNFTFSYTFEDV |
| | PFHSSYAHSQSLDRLMNPLIDQYLYYLARTQSNAGGTAGNRELQFYQGGPTTMAEQAKNW |
| | LPGPCFRQQRVSKTLDQNNNSNFAWTGATKYHLNGRNSLVNPGVAMATHKDDEERFFPSS |
| | GVLIFGKTGAANKTTLENVLMTNEEEIRPTNPVATEEYGTVSSNLQAANTAAQTQVVNNQ |
| | GALPGMVWQNRDVYLQGPIWAKIPHTDGNFHPSPLMGGFGLKHPPPQILIKNTPVPANPP |
| | EVFTPAKFASFITQYSTGQVSVEIEWELQKENSKRWNPEIQYTSNFDKQTGVDFAVDSQG |
| | VYSEPRPIGTRYLTRNL |
| 1294 | MAADGYLPDWLEDNLSEGIREWWDLKPGAPKPKANQQKQDDGRGLVLPGYKYLGPFNGLD |
| | KGEPVNAADAAALEHDKAYDQQLKAGDNPYLRYNHADAEFQERLQEDTSFGGNLGRAVFQ |
| | AKKRVLEPLGLVEEAAKTAPGKKRPVEPSPQRSPDSSTGIGKKGQQPARKRLNFGQTGDS |
| | ESVPDPQPIGEPPAGPSGLGSGTMAAGGGAPMADNNKGADGVGNASGNWHCDSTWLGDRV |
| | ITTSTRTWALPTYNNHLYKQISSQSAGSTNDNVYFGYSTPWGYFDFNRFHCHFSPRDWQR |
| | LINSNWGFRPKKLNFKLFNIQVKEVTTNDGVTTIANNLTSTVQVFSDSEYQLPYVLGSAH |
| | QGCLPPFPADVFMIPQYGYLTLNNGSQSVGRSSFYCLEYFPSQMLRTGNNFTFSYTFEDV |
| | PFHSSYAHSQSLDRLMNPLIDQYLYYLARTQSNAGGTAGNRELQFYQGGPTTMAEQAKNW |
| | LPGPCFRQQRVSKTLDQNNNSNFAWTGATKYHLNGRNSLVNPGVAMATHKDDEERFFPSS |
| | GVLIFGKTGAANKTTLENVLMTNEEEIRPTNPVATEEYGTVSSNLQAANTAAQTQVVNNQ |
| | GALPGMVWQNRDVYLQGPIWAKIPHTDGNFHPSPLMGGFGLKHPPPQILIKNTPVPANPP |
| | EVFTPAKFASFITQYSTGQVSVEIEWELQKENSKRWNPEIQYTSNFDKQTGVDFAVDSQG |
| | VYSEPRPIGTRYLTRNL |
| 1295 | MAADGYLPDWLEDNLSEGIREWWDLKPGAPKPKANQQKQDDGRGLVLPGYKYLGPFNGLD |
| | KGEPVNAADAAALEHDKAYDQQLKAGDNPYLRYNHADAEFQERLQEDTSFGGNLGRAVFQ |
| | AKKRVLEPLGLVEEAAKTAPGKKRPVEPSPQRSPDSSTGIGKKGQQPARKRLNFGQTGDS |
| | ESVPDPQPLGEPPAGPSGLGSGTMAAGGGAPMADNNEGADGVGNASGNWHCDSTWLGDRV |
| | ITTSTRTWALPTYNNHLYKQISSQSAGSTNDNVYFGYSTPWGYFDFNRFHCHFSPRDWQR |
| | LINNNWGFRPKKLNFKLFNIQVKEVTTNDGVTTIANNLTSTVQVFSDSEYQLPYVLGSAH |
| | QGCLPPFPADVFMIPQYGYLTLNNGSQSVGRSSFYCLEYFPSQVLRTGNNFTFSYTFEDV |
| | PFHSSYAHSQSLDRLMNPLIDQYLYYLARTQSNPGGTSGNRELQFYQGGPSTMAEQAKNW |
| | LPGPCFRQQRVSKTLDQNNNSNFAWTGATKYHLNGRNSLVNPGVAMATHKDDEDRFFPSS |
| | GVLIFGKTGATNKTTLENVLMTNEEEIRPTNPVATEEYGIVSSNLQAANTAAQTQVVNNQ |
| | GALPGMVWQNRDVYLQGPIWAKIPHTDGNFHPSPLMGGFGLKHPPPQILIKNTPVPANPP |
| | EVFTPAKFASFITQYSTGQVSVEIEWELQKENSKRWNPEIQYTSNFDKQTGVDFAVDSQG |
| | VYSEPRPIGTRYLTRNL |
| 1296 | MAADGYLPDWLEDNLSEGIREWWDLKPGAPKPKANQQKQDDGRGLVLPGYKYLGPFNGLD |
| | KGEPVNAADAAALEHDKAYDQQLKAGDNPYLRYNHADAEFQERLQEDTSFGGNLGRAVFQ |
| | AKKRVLEPLGLVEEGAKTAPGKKRPVEPSPQRSPDSSTGIGKKGQQPARKRLNFGQTGDS |
| | ESVPDPQPIGEPPAAPSSVGSGTMAAGGGAPMADNNEGADGVGSSSGNWHCDSTRLGDRV |
| | ITTSTRTWALPTYNNHLYKQISSQSAGSTNDNVYFGYSTPWGYFDFNRFHCHFSPRDWQR |
| | LINNNWGFRPKKLNFKLFNIQVKEVTTNDGVTTIANNLTSTVQVFSDSEYQLPYVLGSAH |
| | QGCLPPFPADVFMIPQYGYLTLNNGSQSVGRSSFYCLEYFPSQMLRTGNNFTFSYTFEDV |
| | PFHSSYAHSQSLDRLMNPLIDQYLYYLARTQSNAGGTAGNRELQFYQGGPTTMAEQAKNW |
| | LPGPCFRQRRVSKTLDQNNNSNFAWTGATKYHLNGRNSLVNPGVAMATHKDDEERFFPSS |
| | GVLIFGKTGAANKTTLENVLMTNEEEIRPTNPVATEEYGTVSSNLQAANTAAQTQVVNNQ |
| | GALPGMVWQNRDVYLQGPIWAKIPHTDGNFHPSPLMGGFGLKHPPPQILIKNTPVPANPP |
| | EVFTPAKFASFITQYSTGQVSVEIEWELQKENSKRWNPEIQYTSNFDKQTGVDFAVDSQG |
| | VYSEPRPIGTRYLTRNL |
| 1297 | MAADGYLPDWLEDNLSEGIREWWDLKPGAPKPKANQQKQDDGRGLVLPGYKHLGPFNGLD |
| | KGEPVNAADAAALEHDKAYDQQLKAGDNPYLRYNHADAEFQERLQEDTSFGGNLGRAVFQ |
| | AKKRVLEPLGLVEEGAKTAPGKKRPVEPSPQRSPDSSTGIGKKGQQPARKRLNFGQTGDS |
| | ESVPDPQPIGEPPAAPSSVGSGTMAAGGGAPMADNNEGADGVGSSSGNWHCDSTWLGDRV |
| | ITTSTRTWALPTYNNHLYKQISNGTSGGSTNDNTYFGYSTPWGYFDFNRFHCHFSPRDWQ |
| | RLINNNWGFRPKRLSFKLFNIQVKEVTQNEGTKTIANNLTSTVQVFSDSEYQLPYVLGSA |
| | HQGCLPPFPADVFMIPQYGYLTLNNGSQSVGRSSFYCLEYFPSQMLRTGNNFTFSYTFED |
| | VPFHSSYAHSQSLDRLMNPLIDQYLYYLARTQSNAGGTAGNRELQFYQGGPTTMAEQAKN |
| | WLPGPCFRQQRVSKTLDQNNNSNFAWTGATKYHLNGRNSLVNPGVAMATHKDDEERFFPS |
| | SGVLIFGKTGAANKTTLENVLMTNEEEIRPTNPVATEEYGTVSSNLQAANTAAQTQVVNN |
| | QGALPGMVWQNRDVYLQGPIWAKIPHTDGNFHPSPLMGGFGLKHPPPQILIKNTPVPANP |
| | PEVFTPAKFASFITQYSTGQVSVEIEWELQKENSKRWNPEIQYTSNFDKQTGVDFAVDSQ |
| | GVYSEPRPIGTRYLTRNL |
| 1298 | MAADGYLPDWLEDNLSEGIREWWDLKPGAPKPKANQQKQDDGRGLVLPGYKYLGPFNGLD |
| | KGEPVNAADAAALEHDKAYDQQLKAGDNPYLRYNHADAEFQERLQEDTSFGGNLGRAVFQ |
| | AKKRVLEPLGLVEEAAKTAPGKKRPVEPSPQRSPDSSTGIGKKGQQPARKRLNFGQTGDS |
| | ESVPDPQPIGEPPAGPSGLGSGTMAAGGGAPMADNNEGADGVGNASGNWHCDSTWLGDRV |
| | ITTSTRTWALPTYNNHLYKQISSQSAGSTNDNVYFGYSTPWGYFDFNRFHCHFSPRDWQR |
| | LINNNWGFRPKKLNFKLFNIQVKEVTTNDGVTTIANNLTSTVQVFSDSEYQLPYVLGSAH |
| | QGCLPPFPADVFMIPQYGYLTLNNGSQSVGRSSFYCLEYFPSQMLRTGNNFTISYTFEDV |
| | PFHSSYAHSQSLDRLMNPLIDQYLYYLARTQSNAGGTAGNQELQFYQGGPTTMAEQAKNW |
| | LPGPCFRQQRVSKTLDQNNNSNFAWTGATKYHLNGRNSLVNPGVAMATHKDDEERFFPSS |
| | GVLIFGKTGAANKTTLENVLMTNEEEIRPTNPVATEEYGTVSSNLQAANTAAQTQVVNNQ |
| | GALPGMVWQNRDVYLQGPIWAKIPHTDGNFHPSPLMGGFGLKHPPPQILIKNTPVPADPP |
| | TAFNQAKLNSFITQYSTGQVSVEIEWELQKENSKRWNPEIQYTSNYYKSTNVDFAVNTEG |
| | VYSEPRPIGTRYLTRNL |
| 1299 | MAADGYLPDWLEDNLSEGIHEWWDPKPGAPKPKANQQKQDDGRGLVLPGYKYLGPFNGLD |
| | KGEPVNAADAAALEHDKAYDQQLKAGDNPYLRYNHADAEFQERLQEDTSFGGNLGRAVFQ |
| | AKKRVLEPLGLVEEGAKTAPGKKRPVEPSPQRSPDSSTGIGKKGQQPARKRLNFGQTGDS |
| | ESVPDPQPIGEPPAAPSSVGSGTMAAGGGAPMADNNEGADGVGSSSGNWHCDSTWLGDRV |
| | ITTSTRTWALPTHNNHLYKQISNGTSGGSTNDNVYFGYSTPWGYFDFNRFHCHFSPRDRQ |
| | RLINNNWGFRPKRLSFKLFNIQVKEVTQNEGTKTIANNLTSTIQVFTDSEYQLPYVLGSA |
| | HQGCLPPFPADVFMIPQYGYLTLNNGSQAVGRSSFYCLEYFPSQMLRTGNNFSFSYTFED |
| | VPFHSSYAHSQSLDRLMNPLIDQYLYYLSRTQSTEGTAGTQQLLFSQAGPSNMSAQARNW |
| | LPGPCYRQQRVSTTLSQNNNSNFAWTGATKYHLNGRDSLVNPGVAMATHKDDEERFFPSS |
| | GVLIFGKTGAANKTTLENVLMTNEEEIRPTNPVATEEYGTVSSNLQAANTAAQTQVVNNQ |
| | GALPGMVWQNRDVYLQGPIWAKIPHTDGNFHPSPLMGGFGLKHPQILIKNTPVPANPPEV |
| | FTPAKFASFITQYSTGQVSVEIEWELQKENSKRWNPEIQYTSNFDKQTGVDFAVDSQGVY |
| | SEPRPIGTRYLTRNL |
| 1300 | MAADGYLPDWLEDTLSEGIRQWWKLKPGPPPPKPAERHKDDSRGLVLPGYKYLGPGNGLD |
| | KGEPVNAADAAALEHDKAYDQQLKAGDNPYLKYNHADAEFQERLKEDTSFGGNLGRAVFQ |
| | AKKRLLEPLGLVEEAAKTAPGKKRPVEQSPQEPDSSAGIGKSGSQPAKKKLNFGQTGDTE |
| | SVPDPQPIGEPPAAPSGVGSLTMASGGGAPVADNNEGADGVGSSSGNWHCDSQWLGDRVI |
| | TTSTRTWALPTYNNHLYKQISNSTSGGSSNDNAYFGYSTPWGYFDFNRFHCHFSPRDWQR |
| | LINNNWGFRPKRLNFKLFNIQVKEVTDNNGVKTIANNLTSTVQVFTDSDYQLPYVLGSAH |
| | EGCLPPFPADVFMIPQYGYLTLNDGGQAVGRSSFYCLEYFPSQMLRTGNNFQFSYEFENV |
| | PFHSSYAHSQSLDRLMNPLIDQYLYYLSKTINGSGQNQQTLKFSVAGPSNMAVQGRNYIP |
| | GPSYRQQRVSTTVTQNNNSEFAWPGASSWALNGRNSLMNPGPAMASHKEGEDRFFPLSGS |
| | LIFGKQGTGRDNVDADKVMITNEEEIKTTNPVATESYGQVATNHQSAQAQAQTGWVQNQG |
| | ILPGMVWQDRDVYLQGPIWAKIPHTDGNFHPSPLMGGFGMKHPPPQILIKNTPVPADPPT |
| | AFNKDKLNSFITQYSTGQVSVEIEWELQKENSKRWNPEIQYTSNYYKSNNVEFAVSTEGV |
| | YSEPRPIGTRYLTRNL |
| 1301 | MAADGYLPDWLEDTLSEGIRQWWKLKPGPPPPKPAERHKDDSRGLVLPGYKYLGPGNGLD |
| | KGEPVNAADAAALEHDKAYDQQLKAGDNPYLKYNHADAEFQERLKEDTSFGGNLGRAVFQ |
| | AKKRLLEPLGLVEEAAKTAPGKKRPVEQSPQEPDSSAGIGKSGSQPAKKKLNFGQTGDTE |
| | SVPDPQPIGEPPAAPSGVGSLTMASGGGAPVADNNEGADGVGSSSGNWHCDSQWLGDRVI |
| | TTSTRTWALPTYNNHLYKQISNSTSGGSSNDNAYFGYSTPWGYFDFNRFHCHFSPRDWQR |
| | LINNNWGFRPKRLNFKLFNIQVKEVTDNNGVKTIANNLTSTVQVFTDSDYQLPYVLGSAH |
| | EGCLPPFPADVFMIPQYGYLTLNDGSQAVGRSSFYCLEYFPSQMLRTGNNFQFSYEFENV |
| | PFHSSYAHSQSLDRLMNPLIDQYLYYLSKTINGSGQNQQTLKFSVAGPSNMAVQGRNYIP |
| | GPSYRQQRVSTTVTQNNNSEFAWPGASSWALNGRNSLMNPGPAMASHKEGEDRFFPLSGS |
| | LIFGKQGTGRDNVDADKVMITNEEEIKTTNPVATESYGQVATNHQSAQAQAQTGWVQNQG |
| | ILPGMVWQDRDVYLQGPIWAKIPHTDGNFHPSPLMGGFGMKHPPPQILIKNTPVPADPPT |
| | AFNKDKLNSFITQYSTGQVSVEIEWELQKENSKRWNPEIQYTSNYYKSNNVEFAVNTEGV |
| | YSEPRPIGTRYLTRNL |
| 1302 | MAADGYLPDWLEDTLSEGIRQRWKLKPGPPPPEPAERHKDDSRGLVLPGYKYLGPFNGLD |
| | KGEPVNEADAAALEHDKAYDRQLDSGDNPYLKYNHADAEFQERLKEDTSFGGNLGRAVFQ |
| | AKKRVLEPLGLVEEPVKTAPGKKRPVEHSPVEPDSSSGTGKAGQQPARKRLNFGQTGDAD |
| | SVPDPQPLGQPPAAPSGLGTNTMATGSGAPMADNNEGADGVGNSSGNWHCDSTWMGDRVI |
| | TTSTRTWALPTYNNHLYKQISSQSGASNDNHYFGYSTPWGYFDFNRFHCHFSPRDWQRLI |
| | NNNWGFRPKRLNFKLFNIQVKEVTQNDGTTTIANNLTGTVQVFTDSEYQLPYVLGSAHQG |
| | CLPPFPADVFMVPQYGYLTLNNGSQAVGRSSFYCLEYFPSQMLRTGNNFTFSYTFEDVPF |
| | HSSYAHSQSLGRLMNPLIDQYLYYLSRTNTPSGTTTQSRLQFSQAGASDIRDQSRNWLPG |
| | PCYRQQRVSKTSADNNNSEYSWTGATKYHLNGRDSLVNPGPAMASHKDDEEKFFPQSGVL |
| | IFGKQGSEKTNVDIEKVMITDEEEIRTTNPVATEQYGSVSTNLQRGNRQAATADVNTQGV |
| | LPGMVWQDRDVYLQGPIWAKIPHTDGHFHPSPLMGGFGLKHPPPQILIKNTPVPANPSTT |
| | FSAAKFASFITQYSTGQVSVEIEWELQKENSKRWNPEIQYTSNYNKSVNVDFTVDINGVY |
| | SEPRPIGTRYLTRNL |
| 1303 | MAADGYLPDWLEDTLSEGIRQRWKLKPGPPPPEPAERHKDDSRGLVLPGYKYLGPFNGLD |
| | KGEPVNEADAAALEHDKAYDRQLDSGDNPYLKYNHADAEFQERLKEDTSFGGNLGRAVFQ |
| | AKKRVLEPLGLVEEPVKTAPGKKRPVEHSPVEPDSSSGTGKAGQQPARKRLNFGQTGDAD |
| | SVPDPQPLGQPPAAPSGLGTNTMATGSGAPMADNNEGADGVGNSSGNWHCDSTWMGDRVI |
| | TTSTRTWALPTYNNHLYKQISSQSGASNDNHYFGYSTPWGYFDFNRFHCHFSPRDWQRLI |
| | NNNWGFRPKRLNFKLFNIQVKEVTQNDGTTTIANNLTSTVQVFTDSEYQLPYVLGSAHQG |
| | CLPPFPADVFMVPQYGYLTLNNESQAVGRSSFYCLEYFPSQMLRTGNNFTFSYTFEDVPF |
| | HSSYAHSQSLGRLMNPLIDQYLYYLSRTNTPSGTTTQSRLQFSQAGASDIRDQSRNWLPG |
| | PCYRQQRVSKTSADNNNSEYSWTGATKYHLNGRDSLVNPGPAMASHKDDEEKFFPQSGVL |
| | IFGKQGSEKTNVDIEKVMITDEEEIRTTNPVATEQYGSVSTNLQRGNRQAATADVNTQGV |
| | LPGMVWQDRDVYLQGPIWAKIPHTDGHFHPSPLMGGFGLKHPPPQILIKNTPVPANPSTT |
| | FSAAKFASFITQYSTGQVSVEIEWELQKENSKRWNPEIQYTSNYNKSVNVDFTVDTNGVY |
| | SEPRPIGTRYLTRNL |
| 1304 | MAADGYLPDWLEDTLSEGIRQRWKLKPGPPPPEPAERHKDDSRGLVLPGYKYLGPFNGLD |
| | KGEPVNEADAAALEHDKAYDRQLDSGDNPYLKYNHADAEFQERLKEDTSFGGNLGRAVFQ |
| | AKKRVLEPLGLVEEPVKTAPGKKRPVEHSPVEPDSSSGTGKAGQQPARKRLNFGQTGDAD |
| | SVPDPQPLGQPPAAPSGLGTNTMATGSGAPMADNNEGADGVGNSSGNWHCDSTWMGDRVI |
| | TTSTRTWALPTYNNHLYKQISSQSGASNDNHYFGYSTPWGYFDFNRFHCHFSPRDWQRLI |
| | NNNWGFRPKRLNFKLFNIQVKEVTQNDGTTTIANNLTSTVQVFTDSEYQLPYVLGSAHQG |
| | CLPPFPADVFMVPQYGYLTLNNGSQAAGRSSFYCLEYFPSQMLRTGNNFTFSYTFEDVPF |
| | HSSYAHSQSLGRLMNPLIDQYLYYLSRTNTPSGTTTQSRLQFSQAGASDIRDQSRNWLPG |
| | PCYRQQRVSKTSADNNNSEYSWTGATKYHLNGRDSLVNPGPAMASHKDDEEKFFPQSGVL |
| | IFGKQGSEKTNVDIEKVMITDEEEIRTTNPVATEQYGSVSTNLQRGNRQAATADVNTQGV |
| | LPGMVWQDRDVYLQGPIWAKIPHTDGHFHPSPLMGGFGLKHPPPQILIKNTPVPANPSTT |
| | FSAAKFASFITQYSTGQVSVEIEWELQKENSKRWNPEIQYTSNYNKSVNVDFTVDTNGVY |
| | SEPRPIGTRYLTRNL |
| 1305 | MAADGYLPDWLEDTLSEGIRQWWKLKPGPPPPKPAERHRDDSRGLVLPGYKYLGPFNGLD |
| | KGEPVNEADAAALEHDKAYDRQLDSGDNPYLKYNHADAEFQERLKEDTSFGGNLGRAVFQ |
| | AKKRVLEPLGLVEEPVKTAPGKKRPVEHSPVEPDSSSGTGKAGQQPARKRLNFGQTGDAD |
| | SVPDPQPLGQPPAAPSGLGTNTMATGSGAPMADNNEGADGVGNSSGNWHCDSTWMGDRVI |
| | TTSTRTWALPTYNNHLYKQISSQSGASNDNHYFGYSTPWGYFDFNRFHCHFSPRDWQRLI |
| | NNNWGFRPKRLNFKLFNIQVKEVTQNDGTTTIANNLTSTVQVFTDSGYQLPYVLGSAHQG |
| | CLPPFPADVFMVPQYGYPTLNNGSQAVGRSSFYCLEYFPSQMLRTGNNFTFSYTFEDVPF |
| | HSSYAHSQSLDRLMNPLIDQYLYYLSTTNTPSGTTTQSRLQFSQAGASDIRDQSRNWLPG |
| | PCYRQQRVSKTSADNNNSEYSWTGATKYHLNGRDSLVNPGPAVASHKDDEEKFFPQSGVL |
| | IFGKQGSEKTNVDIEKVMITDEEEIRTTNPVATEQYGSVSTNLQRGNRQAATADVNTQGV |
| | LPGMVWQDRDVYLQGPIWAKIPHTDGHFHPSPLMGGFGLKHPPPQILIKNTPVPANPSTT |
| | FSAAKFASFITQYSTGQVSVEIEWELQKENSKRWNPEIQYTSNYNKSVNVDFTVDINGVY |
| | SEPRPIGTRYLTRNL |
| 1306 | MAADGYLPDWLEDTLSEGIRQWWKLKPGPPPPKPAERHRDDSRGLVLPGYKYLGPFNGLD |
| | KGEPVNEADAAALEHDKAYDRQLDSGDNPYLKYNHADAEFQERLKEDTSFGGNLGRAVFQ |
| | AKKRVLEPLGLVGEPVKTAPGKKRPVEHSPVEPDSSSGTGKAGQQPARKRLNFGQTGDAD |
| | SVPDPQPLGQPPAAPSGLGTNTMATGSGAPMADNNEGADGVGNSSGNWHCDSTWMGDRVI |
| | TTSTRTWALPTYNNHLYKQISSQSGASNDSHYFGYSTPWGYFDFNRFHCHFSPRDWQRLI |
| | NNNWGFRPKRLNFKLFNIQVKEVTQNDGTTTIANNLTSTVQVFTDSEYQLPYVLGSAHQG |
| | CLPPFPADVFMVPQYGYLTLNNGSQAVGRSSFYCLEYFPSQMLRTGNNFTFSYTFEDVPF |
| | HSSYAHSQSLDRLMNPLIDQYLYYLSTTNTPSGTTTQSRLQFSQAGASDIRDQSRNWLPG |
| | PCYRQQRVSKTSADNNNSEYSWTGATKYHLNGRDSLVNPGPAMASHKDNEEKFFPQSGVL |
| | IFGKQGSEKTNVDIEKVMITDEEEIRTTNPVATEQYGSVSTNLQRGNRQAATADVNTQGV |
| | LPGMVWQDRDVYLQGPIWAKIPHTDGHFHPSPLMGGFGLKHPPPQILIKNTPVPANPSTT |
| | FSAAKFASFITQYSTGQVSVEIEWELQKENSKRWNPEIQYTSNYNKSVNVDFTVDINGVY |
| | SEPRPIGTRYLTRNL |
| 1307 | MAADGYLPDWLEDTLSEGIRQWWKLKPGPPPPKPAERHKDDSRGLVLPGYKYLGPFNGLD |
| | KGEPVNEADAAALEHDKAYDRQLDSGDNPYLKYNHADAEFQERLKEDTSFGGNLGRAVFQ |
| | AKKRVLEPLGLVEEPVKTAPGKKRPVEHSPAEPDSSSGTGKAGQQPARKRLNFGQTGDAD |
| | SVPDPQPLGQPPAAPSGLGTNTMASGSGAPMADNNEGADGVGNSSGNWHCDSTWMGDRVI |
| | TTSTRTWALPTYNNHLYKQISSQSGASNDNHYFGYSTPWGYFDFNRFHCHFSPRDWQRLI |
| | NNNWGFRPKRLNFKLFNIQVKEVTQNDGTTTIANNLTSTVQVFTDSEYQLPYVLGSAHQG |
| | CLPPFPADVFMVPQYGYLTLNNGSQAVGRSSFYCLEYFPSQMLRTGNNFTFSYTFEDVPF |
| | HSSYAHSQSLDRLMNPLIDQYLYYLSRTNTPSGTTTQSRLQFSQAGASDIRDQSRNWLPG |
| | PCYRQQRVSKTSADNNNSEYSWTGATKYHLNGRDSLVNPGPAMASHKDDEEKFFPQSGVL |
| | IFGKQGSEKTNVDIEKVMITDEEEIRTTNPVATEQYGSVSTNLQGGNTQAATADVNTQGV |
| | LPGMVWQDRDVYLQGPIWAKIPHTDGHFHPSPLMGGFGLKHPPPQILIKNTPVPANPSTT |
| | FSAAKFASFITQYSTGQVSVEIEWELQKENSKRWNPEIQYTSNYNKSVNVDFTVDTNGVY |
| | SEPRPIGTRYLTRNL |
| 1308 | MAADGYLPDWLEDTLSEGIRQWWKLKPGPPPPKPAERHKDDSRGLVLPGYKYLGPFNGLD |
| | KGEPVNEADAAALEHDKAYDRQLDSGDNPYLKYNHADAEFQERLKEDTSFGGNLGRAVFQ |
| | AKKRVLEPLSLVEEPVKTAPGKKRPVEHSPAEPDSSSGTGKSGNQPARKRLNFGQTGDSD |
| | SVPDPQPLGQPPAAPSGLGTNTMATGSGAPMADNNEGADGVGNSSGNWHCDSTWMGDRVI |
| | TTSTRTWALPTYNNHLYKQISSQSGASNDNHYFGYSTPWGYFDFNRFHCHFSPRDWQRLI |
| | NNNWGFRPKRLNFKLFNIQVKEVTQNDGTTTIANNLTSTVQVFTDSEYQLPYVLGSAHQG |
| | CLPPFPADVFMVPQYGYLTLNNGSQAVGRSSFYCLEYFPSQMLRTGNNFTFSYTFEDVPF |
| | HSSYAHSQSLDRLMNPLIDQYLYYLSRTNTPSGTTTQSRLQFSQAGASDIQDQSRNWLPG |
| | PCYRQQRVSKTSADNNNSEYSWTGATKYHLNGRDSLVNPGPAMASHKDDEEKFFPQSGVL |
| | IFGKQGSEKTNVDIEKVMITDEEEIRTTNPVATEQYGSVSTNLQSGNTQAATADVNTQGV |
| | LPGMVGQDRDVYLQGPTWAKIPHTDGHFHPSPLMGGFGLKHPPPQILIKNTPVPANPSTT |
| | FSAAKFASFITQYSTGQVSVEIEWELQKENSKRWNPEIQYTSNYNKSVNVDFTVDTNGVY |
| | SEPRPIGTRYLTRNL |
| 1309 | MAADGYLPDWLEDTLSEGIRQWWKLKPGPPPPKPAERHKDDSRGLVLPGYKYLGPFNGLD |
| | KGEPVNEADAAALEHDKAYDRQLDSGDNPYLKYNHADAEFQERLKEDTSFGGNLGRAVFQ |
| | AKKRVLEPLGLVEEPVKTAPGKKRPVEHSPAEPDSSSGTGKSGNQPARKRLNFGQTGDSD |
| | SVPDPQPLGQPPAAPSGLGTNTMATGSGAPMADNNEGADGVGNSSGNWHCDSTWMGDRVI |
| | TTSTRTWALPTYNNHLYKQISSQSGASNDNHYFGYSTPWGYFDFNRFHCHFSPRDWQRLI |
| | NNNWGFRPKRLNFKLFNIQVKEVTQNDGTTTIANNLTSTVQVFTDSEYQLPYVLGSAHQG |
| | CLPPFPADVFMVPQYGYLTLNNGSQAVGRSSFYCLEYFPSQMLRTGNSFTFSYTFEDVPF |
| | HSSYAHSQSLDRLMNPLIDQYLYYLSRTNTPSGTTTQSRLQFSQAGASDIRDQSRNWLPG |
| | PCYRQQRVSKTSADNNNSEYSWTGATKYHLNGRDSLVNPGPAMASHKDDEEKFFPQSGVL |
| | IFGKQGSEKTNVDIEKVMITDEEEIRTTNPVATEQYGSVSTNLQSGNTQAATADVNTQGV |
| | LPGMVWQDRDVYLQGPIWAKIPHTDGHFHPSPLMGGFGLKHPPPQILIKNTPVPANPSTT |
| | FSAAKFASFITQYSTGQVSVEIEWELQKENSKRWNPEIQYTSNYNKSVNVDFTVDINGVY |
| | SEPRPIGTRYLTRNL |
| 1310 | MAADGYLPDWLEDTLSEGIRQWWKLKPGPPPPKPAERHKDDSRGLVLPGYKYLGPFNGLD |
| | KGEPVNEADAAALEHDKAYDRQLDSGDNPYLKYNHADAEFQERLKEDTSFGGNLGRAVFQ |
| | AKKRVLEPLGLVEEPVKTAPGKKRPVEHSPAEPDSSSGTGKSGNQPARKRLNFGQTGDSD |
| | SVPDPQPLGQPPAAPSGLGTNTMATGSGAPMADNNEGADGVGNSSGNWHCDSTWMGDRVI |
| | TTSTRTWALPTYNNHLYKQISSQSGASNDNHYFGYSTPWGYFDFNRFHCHFSPRDWQRLI |
| | NNNWGFRPKRLNFKLFNIQVKEVTQNDGTTTIANNLTSTVQVFTDSEYQLPYVLGSAHQG |
| | CLPPFPADVFMVPQYGYLTLNNGSQAVGRSSFYCLGYFPSQMLRTGNNFTFSYTFEDVPF |
| | HSSYAHSQSLDRLMNPLIDQYLYYLSRTNTPSGTTTQSRLQFSQAGASDIRDQSRNWLPG |
| | PCYRQQRVSKTSADNNNSEYSWTGATKYHLNGRDSLVNPGPAMASHKDDEEKFFPQSGVL |
| | IFGKQGPEKTNVDIEKVMITDEEEIRTTNPVATEQYGSVSTNLQSGNTQAATADVNTQGV |
| | LPGMVWQDRDVYLQGPIWAKIPHTDGHFHPSPLMGGFGLKHPPPQILIKNTPVPANPSTT |
| | FSAAKFASFITQYSTGQVSVEIEWELQKENSKRWNPEIQYTSNYNKSVNVDFTVDINGVY |
| | SEPRPIGTRYLTRNL |
| 1311 | MAADGYLPDWLEDTLSEGIRQWWKLKPGPPPPKPAERHKDDSRGLVLPGYKYLGPFNGLD |
| | KGEPVNEADAAALEHDKAYDRQLDSGDNPYLKYNHADAEFQERLKEDTSFGGNLGRAVFQ |
| | AKKRILEPLGLVEEPVKTAPGEKRPVEHSPAEPDSSSGTGKAGQQPARKRLNFGQTGDAD |
| | SVPDPQPLGQPPAAPSGLGTNTMASGSGAPMADNNEGADGVGNSSGNWYCDSTWMGDRVI |
| | TTSTRTWALPTYNNHLYKQISSQSGASNDNHYFGYSTPWGYFDFNRFHCHFSPRDWQRLI |
| | NNNWGFRPKRLSFKLFNIQVKEVTQNDGTTTIANNLTSTVQVFTDSEYQLPYVLGSAHQG |
| | CLPPFPADVFMVPQYGYLTLNNGSQAVGRSSFYCLEYFPSQMLRTGNNFTFSYTFEDVPF |
| | HSSYAHSQSLDRLMNPLIDQYLYYLSRTNTPSGTTTMSRLQFSQAGASDIRDQSRNWLPG |
| | PCYRQQRVSKTAADNNNSDYSWTGATKYHLNGRDSLVNPGPAMASHKDDEEKYFPQSGVL |
| | IFGKQDSGKTNVDIEKVMITDEEEIRTTNPVATEQYGSVSTNLQSGNTQAATSDVNTQGV |
| | LPGMVWQDRDVYLQGPIWAKIPHTDGHFHPSPLVGGFGLKHPPPQILIKNTPVPANPSTT |
| | FSAAKFASFITQYSTGQVSVEIEWELQKENSKRWNPEIQYTSNYNKSVNVDFTVDTNGVY |
| | SEPRPIGTRYLTRNL |
| 1312 | MAADGYLPDWLEDTLSEGIRQWWKLKPGPPPPKPAERHKDDSRGLVLPGYRYLGPFNGLD |
| | KGEPVNEADAAALEHDKAYDRQLDSGDNPYLKYNHVDAEFQERLKEDTSFGGNLGRAVFQ |
| | AKKRILEPLGLVEEPVKAAPGEKRPVEHSPAEPDSSSGTGKAGQQPARKRLNFGQTGDAD |
| | SVPDPQPLGQPPAAPSGLGTNTMASGSGAPMADNNEGADGVGNSSGNWHCDSTWMGDRVI |
| | TTSTRTWALPTYNNHLYKQISSQSGASNDNHYFGYSTPWGHFDFNRFHCHFSPRDWQRLI |
| | NNNWGFRPKRLSFKLFNIQVKEVTQNDGTTTIANNLTSTVQVFTDSEYQLPYVLGSAHQG |
| | CLPPFPADVFMVPQYGYLTLNNGSQAVGRSSFYCLEYFPSQMLRTGNNFTFSYTFEDVPF |
| | HSSYAHSQSLDRLMNPLIDQYLYYLSRTNTPSGTTTMSRLQFSQAGASDIRDQSRNWLPG |
| | PCYRQQRVSKTAADNNNSDYSWTGATKYHLNGRDSLVNPGPAMASHKDDEEKYFPQSGVL |
| | IFGKQDSGKTNVDIEKVMITDEEEIRTTNPVATEQYGSVSTNLQSGNTQAATSDVNTQGV |
| | LPGMVWQDRDVYLQGPIWAKIPHTDGHFHPSPPMGGFGLKHPPPQILIKNTPVPANPSTT |
| | FSAAKFASFITQYSTGQVSVEIEWELQKENSKRWNPEIQYTSNYNKSVNVDFTVDTNGVY |
| | SEPRPIGARYLTRNL |
| 1313 | MAADGYLPDWLEDTLSEGIRQWWKLKPGPPPPKPAERHKDDSRGLVLPGYKYLGPFNGLD |
| | KGEPVNEADAAALEHDKAYDRQLDSGDNPYLKYNHADAEFQERLKEDTSFGGNLGRAVFQ |
| | AKKRILEPLGLVEEPVKTAPGKKRPVEHSPAEPDSSSGTGKAGQQPARKRLNFGQTGDAD |
| | SVPDPRPLGQPPAAPSGLGTNTMASGSGAPMADNNEGADGVGNSSGNWHCDSTWMGDRVI |
| | TTSTRTWALPTYNNHLYKQISSQSGASNDNHYFGYSTPWGYFDFNRFHCHFSPRDWQRLI |
| | NNNWGFRPKRLSFKLFNIQVKEVTQNDGTTTIANNLTSTVQVFTDSEYQLPYVLGSAHQG |
| | CLPPFPADVFMVPQYGYLTLNNGSQAVGRSSFYCLEYFPSQMLRTGNNFTFSYTFEDVPF |
| | HSSYAHSQSLDRLMNPLIDQYLYYLSRTNTPSGTTTMSRLQFSQAGASDIRDQSRNWLPG |
| | PCYRQQRVSKTAADNNNSDYSWTGATKYHLNGRDSLVNPGPAMASHKDDEEKYFPQSGVL |
| | IFGKQDSGKTNVDIEKVMITDEEEIRTTNPVATEQYGSVSTNLQSGNTQAATSDVNTQGV |
| | LPGMVWQDRDVYLQGPIWAKIPHTDGHFHPSPLMGGFGLKHPPPQILIKNTPVPANPSTT |
| | FSAAKFASFITQYSTGQVSVEIEWELQKENSKRWNPEIQYTSNYNKSVNVDFTVDTNGVY |
| | SEPRPIGTRYLTRNL |
| 1314 | MAADGYLPDWLEDTLSEGIRQWWKLKPGPPPPKPAERHKDDSRGLVLPGYKYLGPFNGLD |
| | KGEPVNEADAAALEHDKAYDRQLDSGDNPYLKYNHADAEFQERLKEDTSFGGNLGRAVFQ |
| | AKKRILEPLGLVEEPVKTAPGKKRPVEHSPAEPDSSSGTGKAGQQPARKRLNFGQTGDAD |
| | SVPDPRPLGQPPAAPSGLGTNTMASGSGAPMADNNEGADGVGNSSGNWHCDSTWMGDRVI |
| | TTSTRTWALPTYNNHLYKQISSQSGASNDNHYFGYSTPWGYFDFNRFHCHFSPRDWQRLI |
| | NNNWGFRPKRLSFKLFNIQVKEVTQNDGTTTIANNLTSTVQVFTDSEYQLPYVLGSAHQG |
| | CLPPFPADVFMVPQYGYLTLNNGSQAVGRSSFYCLEYFPSQMLRTGNNFTFSYTFEDVPF |
| | HSSYAHSQSLDRLMNPLIDQYLYYLSRTNTPSGTTTMSRLQFSQAGASDIRDQSRNWLPG |
| | PCYRQQRVSKTAADNNNSDYSWTGATKYHLNGRDSLVNPGPAMASHKDDEEKYFPQSGVL |
| | IFGKQDSGKTNVDIEKVMITDEEEIRTTNPVATEQYGSVSTNLQSGNTQAATSDVNTQGV |
| | LPGMVWQDRDVYLQGPIWAKIPHTDGHFHPSPLMGGFGLKHPPPQILIKNTPVPANPSTT |
| | FSAAKFASFITQYSTGQVSVEIEWELQKENSKRWNPEIQYTSNYNKSVNVDFTVDTNGVY |
| | SEPRPIGTRYLTRNL |
| 1315 | MAADGYLPDWLEDTLSEGIRQWWKLKPGPPPPKPAERHKDDSRGLVLPGYKYLGPFNGLD |
| | KGEPVNEADAAALEHDKAYDRQLDSGDNPYLKYNHADAEFQERLKEDTSFGGNLGRAVFQ |
| | AKKRILEPLGLVEEPVKTAPGKKRPVEHSPAEPDSSSGTGKAGQQPARKRLNFGQTGDAD |
| | SVPDPQPLGQPPAAPSGLGTNTMASGSGAPMADNNEGADGVGNSSGNWHCDSTWMGDRVI |
| | TTSTRTWALPTCNNHLYKQISSQSGASNDNHYFGYSTPWGYFDFNRFHCHFSPRDWQRLI |
| | NNNWGFRPKRLSFKLFNIQVKEVTQNDGTTTIANNLTSTVQVFTDSEYQLPYVLGSAHQG |
| | CLPPFPADVFMVPQYGYLTLNNGSQAVGRSSFYCLEYFPSQMLRTGNNFTFSYTFEDVPF |
| | HSSYAHSQSLDRLMNPLIDQYLYYLSRTNTPSGTTTMSRLQFSQAGASDIRDQSRNWLPG |
| | PCYRQQRVSKTAADNNNSDYSWTGATKYHLNGRDSLVNPGPAMASHKDDEEKYFPQSGVL |
| | IFGKQDSGKTNVDIEKVMITDEEEIRTTNPVATEQYGSVSTYLQSGNTQAATSDVNTQGV |
| | LPGMVWQDRDVYLRGPIWAKIPHTDGHFHPSPLMGGFGLKHPPPQILIKNTPVPANPSTT |
| | FSAAKFASFITQYSTGQVSVEIEWELQKENSKRWNPEIQYTSNYNKSVNVDFTVDTNGVY |
| | SEPRPIGTRYLTRNL |
| 1316 | MAADGYLPDWLEDTLSEGIRQWWKLKPGPPPPKPAERHKDDSRGLVLPGYKYLGPFNGLD |
| | KGEPVNEADAAALEHDKAYDRQLDSGDNPYLKYNHADAEFQERLKGDTSFGGNLGRAVFQ |
| | AKKRILEPLGLVEEPVKTAPGKKRPVEHSPAEPDSSSGTGKAGQQPARKRLNFGQTGDAD |
| | SVPDPQPLGQPPAAPSGLGTNTMASGSGAPMADNNEGADGVGNSSGNWHCDSTWMGGRVI |
| | TTSTRTWALPTYNNHLYKQISSQSGASNDNHYFGYSTPWGYFDFNRFHCHFSPRDWQRLI |
| | NNNWGFRPKRLSFKLFNIQVKEVTQNDGTTTIANNLTSTVQVFTDSEYQLPYVLGSAHQG |
| | CLPPFPADVFMVPQYGYLTLNNGSQAVGRSSFYCLEYFPSQTLRTGNNFTFSYTFEDVPF |
| | HSSYAHSQSLDRLMNPLIDQYLYYLSRTNTPSGTTTMSRLQFSQAGASDIRDQSRNWLPG |
| | PCYRQQRVSKTAADNNNSDYSWTGATKYHLNGRDSLVNPGPAMASHKDDEEKYFPQSGVL |
| | IFGKQDSGKTNVDIEKVMITDEEEIRTTNPVATEQYGSVSTNLQSGNTQAATSDVNTQGV |
| | LPGMVWQDRDVYLQGPIWAKIPHTDGHFHPSPLMGGFGLKHPPPQILIKNTPVPANPSTT |
| | FSAAKFASFITQYSTGQVSVEIEWELQKENSKRWNPEIQYTSNYNKSVNVDFTVDINGVY |
| | SEPRPIGTRYLTRNL |
| 1317 | MAADGYLPDWLEDTLSEGIRQWWKLKPGPPPPKPAERHKDDSRGLVLPGYKYLGPFNGLD |
| | KGEPVNEADAAALEHDKAYDRQLDSGDNPYLKYNHADAEFQERLKEDTSFGGNLGRAVFQ |
| | AKKRILEPLGLVEEPVKTAPGKKRPVEHSPAEPDSSSGTGKAGQQPARKRLNFGQTGDAD |
| | SVPDPQPLGQPPAAPSGLGTNTMASGSGAPMADNNEGADGVGNSSGNWHCDSTWMGDRVI |
| | TTSTRTWALPTYNNHLYKQISSQSGASNDNHYFGYSTPWGYFDFNRFHCHFSPRDWQRLI |
| | NNNWGFRPKRLSFKLFNIQVKEVTQNDGTTTIANNLTSTVQVFTDSEYQLPYVLGSAHQG |
| | CLPPFPADVFMVPQYGYLTLNNGSQAVGRSSFYCLEYFPSQMLRTGNNFTFSYTFEDVPF |
| | HSSYAHSQSLDRLMNPLIDQYLYYLSRTNTPSGTTTMSRLQFSQAGASDIRDQSRNWLPG |
| | PCYRQQRVSKTAADNNNSDYSWTGATKYHLNGRDSLVNPGPAMASHKDDEEKYFPQSGVL |
| | IFGKQDSGKTNVDIEKVMITDEEEIRTTNPVATEQYGSVSTNLQSGNTQAATSDVNTQGV |
| | LPGMVWQDRDVYLQGPIWAKIPHTDGHFHPSPLMGGFGLKHPPPQILIKNTPVPANPSTT |
| | FSAAKFASFITQYSTGQVSVEIEWELQKENSKRWNPEIQYTSNYNKSVNVDFTVDTNGVY |
| | SEPRPIGTRYLTRNL |
| 1318 | MAADGYLPDWLEDTLSEGIRQWWKLKPGPPPPKPAERHKDDSRGLVLPGYKYLGPFNGLD |
| | KGEPVNEADAAALEHDKAYDRQLDSGDNPYLKYNHADAEFQERLKEDTSFGGNLGRAVFQ |
| | AKKRILEPLGLVEEPVKTAPGKKRPVEHSPAEPDSSSGTGKAGQQPARKRLNFGQTGDAD |
| | SVPDPQPLGQPPAAPSGLGTNTMASGSGAPMADNNEGADGVGNSSGNWHCDSTWMGDRVI |
| | TTSTRTWALPTYNNHLYKQISSQSGASNDNHYFGYSTPWGYFDFNRFHCHFSPRDWQRLI |
| | NNNWGFRPKRLSFKLFNIQVKEVTQNDGTTTIANNLTSTVQVFTDSGYQLPYVLGSAHQG |
| | CLPPFPADVFMVPQYGYLTLNNGSQAVGRSSFYCLEYFPSQMLRTGNNFTFSYTFEDVPF |
| | HSSYAHGQSLDRLMNPLIDQYLYYLSRTNTPSGTTTMSRLQFSQAGASDVRDQSRNWLPG |
| | PCYRQQRVSKTAADNNNSDYSWTGATKYHLNGRDSLVNPGPAMASHKDDEEKYFPQSGVL |
| | VFGKQDSGKTNVDIEKVMITDEEEIRTTNPAATEQYGSVSTNLQSGNTQAATSDVNTQGV |
| | LPGMVWQDRDVYLQGPIWAKIPHTDGHFHPSPLMGGFGLKHPPPQILIKNTPVPANPSTT |
| | FSAAKFVSFITQYSTGQVSVEIEWELQKENSKRWNPEIQYTSNYNKSVNVDFTVDTNGVY |
| | SEPRPIGTRYLTRNL |
| 1319 | MAADGYLPDWLEDTLSEGIRQWWKLKPGPPPPKPAERHKDDSRGLVLPGYKYLGPFNGLD |
| | KGEPVNEADAAALEHDKAYDRQLDSGDNPYLKYNHADAEFQERLKEDTSFGGNLGRAVFQ |
| | AKKRVLEPLGLVEEPVKTAPGKKRPVEHSPVEPDSSSGTGKAGQQPARKRLNFGQTGDAD |
| | SVPDPQPLGQPPAAPSGLGSTTMATGSGAPMADNNEGADGVGNSSGNWHCDSQWLGDRVI |
| | TTSTRTWALPTYNNHLYKQISSQSGASNDNHYFGYSTPWGYFDFNRFHCHFSPRDWQRLV |
| | NNNRGFRPKRLNFKLFNIQVKEVTQNDGTTTIANNLTSTVQVFTDSEYQLPYVLGSAHQG |
| | CLPPFPADVFMVPQYGYLTLNNGSQAVGRSSFYCLEYFPSQMLRTGNNFQFSYTFEDVPF |
| | HSSYAHSQSLDRLMNPLIDQYLYYLNKTQTNSGTLQQSRLLFSQAGPTNMSLQAKNWLPG |
| | PCYRQQRLSKQANDNNNSNFPWTAATKYHLNGRDSLVNPGPAMASHKDDEEKFFPMHGTL |
| | IFGKQGTNANDADLENVMITDEEEIRATNPVATEQYGTVSNNLQNSNTGPTTGTVNHQGA |
| | LPGMVWQDRDVYLQGPIWAKIPHTDGHFHPSPLMGGFGLKHPPPQIMIKNTPVPANPPTN |
| | FSSAKFASFITQYSTGQVSVEIEWELQKENSKRWNPEIQYTSNYNKSVNVDFTVDINGVY |
| | SEPRPIGTRYLTRNL |
| 1320 | MAADGYLPDWLEDTLSEGIRQWWKLKPGPPPPKPAERHKDDSRGLVLPGYKYLGPFNGLD |
| | KGEPVNEADAAALEHDKAYDRQLDSGDNPYLKYNHADAEFQERLKEDTSFGGNLGRAVFQ |
| | AKKRVLEPLGLVEEPVKTAPGKKRPVEHSPVEPDSSSGTGKAGQQPARKRLNFGQTGDAD |
| | SVPDPQPLGQPPAAPSGLGSTTMATGSGAPMADNNEGADGVGNSSGNWHCDSQWLGDRVI |
| | TTSTRTWALPTYNNHLYKQISSQSGASNDNHYFGYSTPWGYFDFNRFHCHFSPRDWQRLI |
| | NNNWGFRPKRLNFKLFNIQVKEVTQNDGTTTIANNLTSTVQVFTDSEYQLPYVLGSAHQG |
| | CLPPFPADVFMVPQYGYLTLNNGSQAVGRSSFYCLEYFPSQMLRTGNNFQFSYTFEDVPF |
| | HSSYAHSQSLDRLMNPLIDQYLYYLNKTQTNSGTLQQSRLLFSQAGPTNMSLQAKNWLPG |
| | PCYRQQRLSKQANDNNNSNFPWTAATKYHLNGRDSLVNPGPAMASRKDDEEKFFPMHGTL |
| | IFGKQGTNANDADLENVMITDEEEIRATNPVATEQYGTVSNNLQNSNTGPTTGTVNHQGA |
| | LPGMVWQDRDVYLQGPIWAKIPHTDGHFHPSPLMGGFGLKHPPPQIMIKNTPVPANPPTN |
| | FSSAKFASFITQYSTGQVSVEIEWELQKENSKRWNPEIQYTSNYNKSVNVDFTVDTNGVY |
| | SEPRPIGTRYLTRNL |
| 1321 | MAADGYPPDWLEDTLSEGIRQWWKLKPGPPPPKPAERHKDDSRGLVLPGYKYLGPFNGLD |
| | KGEPVNEADAAALEHDKAYDRQLDSGDNPYLKYNHADAEFQERLKEDTSFGGNLGRAVFQ |
| | AKKRVLEPLGLVEEPVKTAPGKKRPVEHSPVEPDSSSGTGKAGQRPARKRLNFGQTGDAD |
| | SVPDPQPLGQPPAAPSGLGSTTMATGSGAPMADNNEGADGVGNSSGNWHCDSQWLGDRVI |
| | TTSTRTWALPTYNNHLYKQISSQSGASNDNHYFGYSTPWGYFDFNRFHCHFSPRDWQRLI |
| | NNNWGFRPKRLNFKLFNIQVKEVTQNDGTTTIANNLTSTVQVFTDSEYQLPYVLGSAHQG |
| | CLPPFPADVFMVPQYGYLTLNNGSQAVGRSSFYCLEYFPSQMLRTGNNFQFSYTFEDVPF |
| | HSSYAHSQSLDRLMNPLIDQYLYYLNKTQTNSGTLQQSRLLFSQAGPTNMSLQAKNWLPG |
| | PCYRQQRLSKQANDNNNSNFPWTAATKYHLNGRDSLVNPGPAMASHKDDEEKFFPMHGTL |
| | IFGKQGTNANDADLENVMITDEEEIRATNPVATEQYGTVSNNLQNSNTGPTTGTVNRQGA |
| | LPGMVWQDRDVYLQGPIWAKIPHTDGHFHPSPLMGGFGLKHPPPQIMIKNTPVPANPPTN |
| | FSSAKFASFITQYSTGQVSVEIEWELQKENSKRWNPEIQYTSNYNKSVNVDFTVDTNGVY |
| | SEPRPIGTRYLTRNL |
| 1322 | MAADGYLPDWLEDTLSEGIRQWWKLKPGPPPPKPAERHKDDSRGLVLPGYKYLGPFNGLD |
| | KGEPVNEADAAALEHDKAYDRQLDSGDNPYLKYNHADAEFQERLKEDTSFGGNLGRAVFQ |
| | AKKRVLEPLGLVEEPVKTAPGKKRPVEHSPVEPDSSSGTGKAGQQPARKRLNFGQTGDAD |
| | SVPDPQPLGQPPAAPSGLGSTTMATGSGAPMADNNEGADGVGNSSGNWHCDSQWLGDRVI |
| | TTSTRTWALPTYNNHLYKQISSQSGASNDNHYFGYSTPWGYFDFNRFHCHFSPRDWQRLI |
| | NNNWGFRPKRLNFKLFNIQVKEVTQNGGTTTIANNLTSTVQVFTDSEYQLPYVLGSAHQG |
| | CLPPFPADVFMVPQYGYLTLNNGSQAVGRSSFYCLEYFPSQMLRTGNNFQFSYTFEDVPF |
| | HSSYAHSQSLDRLMNPLIDQYLYYLNKTQTNSGTLQQSRLLFSQAGPTNMSLQAKNWLPG |
| | PCYRQQRLSKQANGNNNSNFPWTAATKYHLNGRDSLVNPGPAMASHKDDEEKFFPMHGTL |
| | IFGKQGTNANDADLENVMITDEEEIRATNPVATEQYGTVSNNLQNSNTGPTTGTVNHQGA |
| | LPGMVWQDRDVYLQGPIWAKIPHTDGHFHPSPLTGGFGLKHPPPQIMIKNTPVPANPPTN |
| | FSSAKFASFITQYSTGQVSVEIEWELQKENSKRWNPEIQYTSNYNKSVNVDFTVDINGVY |
| | SEPRPIGTRYLTRNL |
| 1323 | MAADGYLPDWLEDTLSEGIRQWWKLKPGPPPPKPAERHKDDSRGLVLPGYKYLGPFNGLD |
| | KGEPVNEADAAALEHDKAYDRQLDSGDNPYLKYNHADAEFQERLKEDTSFGGNLGRAVFQ |
| | AKKRVLEPLRPGLRKPVKTAPGKKRPVEHSPVEPDSSSGTGKAGQQPARKRLNFGQTGDA |
| | DSVPDPQPLGQPPAAPSGLGSTTMATGSGAPMADNNEGADGVGNSSGNWHCDSQWLDDRV |
| | IATSTRTWALPTYNNHLYKQISSQSGACNDNHYFGYSTPWGYFDFNRFHCHFSPRDWQRL |
| | INSNWGFRPKRLNFKLFNIQVKEVTQNDGTTTIANNLTSTVQVFTDSEYQLPYVPGSAHQ |
| | GCLPPFPADVFMVPQYGYLTLNNGSQAVGRSSFYCLEYFPSQMLRTGNNFQFSYTFEDVP |
| | FHSSYAHCQSLDRLMNPLIDQYLYYLNKTQTNSGTLQQSRLLFSQAGPTNMSLQAKNWLP |
| | GPCYRQQRLSKQANDNNNCNFPWTAATKYHLNGRDSLVNPGPAMASHKDDEEKFFPMHGT |
| | LIFGKQGTNANDADLENVMITDEEEIRPTNPVATEQYGTVSNNLQNSNTGPTTGTVNHQG |
| | ALPGMVWQDRDVYLQGPIWAKIPHTDGHFHPSPLMGGFGLKHPPPQIMIKSTPVPANPPT |
| | NFSSAKFASSITQYSTGQVSVEIEWELQKENSKRWNPEIQYTSNYNKSVNVDFTVDTNGV |
| | YSEPRPIGTRYLTRNL |
| 1324 | MAADGYLPDWLEDTLSEGIRQWWKLKPGPPPPKPAERHKDGSRGLVLPGYKYLGPFNGLD |
| | KGEPVNEADAAALEHDKAYDRQLNSGDNPYLKYNHADAEFQERLKEDTSFGGNLGRAVFQ |
| | AKKRVLEPLGLVEEPVKTAPGKKRPVEHSPAEPDSSSGTGKAGQQPARKRLNFGQTGDAD |
| | SVPDPQPLGQPPAAPSGLGSTTMATGSGAPMADNNEGADGVGNSSGNWHCDSQWLGDRVI |
| | TTSTRTWALPTYNNHLYKQISSQSGASNDNHYFGYSTPWGYFDFNRFHCHFSPRDWQRLI |
| | NNNWGFRPKRLNFKLFNIQVKEVTQNDGTTTIANNLTSTVQVFTDSEYQLPYVLGSAHQG |
| | CLPPFPADVFMVPQYGYLTLNNGSQAVGRSPFYCLEYFPSQMLRTGNNFQFSYTFEDVPF |
| | HSSYAHSQSLDRLMNPLIDQYLYYLNKTQTNSGTLQQSRLLFSQAGPTNMSLQAKNWLPG |
| | PCYRQQRLSKQANDNNNSNFPWTAATKYHLNGRDSLVNPGPAMASHKDDEEKFFPMHGTL |
| | IFGKQGTNANDADLENVMITDEEEIRTTNPVATEQYGTVSNNLQNSNTGPTTGTVNHQGA |
| | LPGMVWQDRDVYLQGPIWAKIPHTDGHFHPSPLMGGFGLKHPPPQIMIKNTPVPANPPTN |
| | FSSAKFASFITQYSTGQVSVEIEWELQKENSKRWNPEIQYTSNYNKSVNVDFTVDNNGVY |
| | SEPRPIGTRYLTRNL |
| 1325 | MAADGYLPDWLEDTLSEGIRQWWKLKPGPPPPKPAERHKDDSRGLVLPGYKYLGPFNGLY |
| | KGEPVDEADAAALEHDKAYDRQLDSGDNPYLKYNHADAEFQERLKEDTSFGGNLGRAVFQ |
| | AKKRVLEPLGLVGEPVKTAPGKKRPVEHSPVEPDSSSGTGKAGNQPARKRLNFGQTGDAD |
| | SVPDPQPLGQPPAAPSGLGSTTMATGSGAPVADNNEGADGVGNSSGNWHCDSQWLGDRVI |
| | TTSTRTWALPTYNNHLYKQISSQSGASNDNHYFGYSTPWGYFDFNRFHCHFSPRDRQRLI |
| | NNNWGFRPKRLNFKLFNIQVKEVTQNDGTTTIANNLTSTVQVFTDSGYQLPYVLGLAHQG |
| | CLPPFPADVFMVPQYGYLTLNNGSQAVGRSSFYCLEYFPSQMLRTGNNFQFSYTFEDVPF |
| | HSSYAHSQSLDRLMNPLIDQYLYYLNKTQSNSGTLQQSRLLFSQAGPTSMSLQAKNWLPG |
| | PCYRQQRLSKQANDNNNSNFPWTAATKYHLNGRDSLVNPGPAMASHKDDEEKFFPMHGTL |
| | IFGKQGTNANDADLDNVMITDEEEIRTTNPVATEQYGYVSNNLQNSNTGPTTGTVNHQGA |
| | LPGMVWQDRDVYLQGPIWAKIPHTDGHFHPSPLMGGFGLKHPPPQIMIKNTPVPANPPTN |
| | FSSAKFASFITQYSTGQVSVEIEWELQKEDSKRWNPEIQYTSNYNKPVNVDFTVDINGVY |
| | SEPRPIGTRYLTRNL |
| 1326 | MAADGYLPDWLEDTLSEGIRQWWKLKPGPPPPKPAERHKDDSRGLVLPGYKYLGPFNGLY |
| | KGEPVNEADAAALEHDKAYDRQLDSGDNPYLKYNHAGAEFQERLKEDTSFGGNLGRAVFQ |
| | AKKRVLEPLGLVEEPVKTAPGKKRPVEHSPVEPDSSSGTGKAGNQPARKRLNFGQTGDAD |
| | SVPDPQPLGQPPAAPSGLGSTTMATGSGAPVADNNEGADGVGNSSGNWHCDSQWLGDRVI |
| | TTSTRTWALPTYNNHLYKQISSQSGASNDNHYFGYSTPWGYFDFNRFHCHFSPRDWQRLI |
| | NNNWGFRPKRLNFKLFNIQVKEVTQNDGTTTIANNLTSTVQVFTDSEYQLPYVLGSAHQG |
| | CLPPFPADVFMVPQYGYLTLNNGSQAVGRSSFYCLEYFPSQMLRTGNNFQFSYTFEDVPF |
| | HSSYAHSQSLDRLMNPLIDQYLYYLNKTQSNSGTLQQSRLLFSQAGPTSMSLQAKNWLPG |
| | PCYRQQRLSKQANDNNNSNFPWTAATKYHLNGRDSLVNPGPAMASHKDDEEKFFPMHGTL |
| | IFGKQGTNANDADLDNVMITDEEEIRTTNPVATEQYGYVSNNLQDSNTGPTTGTVNHQGA |
| | LPGMVWQDRDVYLQGPIWAKIPHTDGHFHPSPLMGGFGLKHPPPQIMIKNTPVPANPPTN |
| | FSSAKFASFITQYSTGQVSVEIEWELQKENSKRWNPEIQYTSNYNKSVNVDFTVDINGVY |
| | SEPRPIGTRYLTRNL |
| 1327 | MAADGYLPDWLEDTLSEGIRQWWKLKPGPPPPKPAERHKDDSRGLVLPGYKYLGPFNGLD |
| | KGEPVNEADAAALEHDKAYDRQLESGDNPYLKYNHADAEFQERLKEDTSFGGNLGRAVFQ |
| | AKKRVLEPLGLVEEPVKTAPGKKRPVEHSPVEPDSSSGTGKAGQQPARKRLNFGQTGDAD |
| | SVPDPQPLGQPPAAPSGLGSTTMASGSGAPVADNNEGADGVGNSSGNWHCDSQWLGDRVI |
| | TTSTRTWALPTYNNHLYKQISSQSGASNDNHYFGYSTPWGYFDFNRFHCHFSPRDWQRLI |
| | NNSWGFRPKRLNFKLFNIQVKEVTQNDGTTTIANNLTSTVQVFTDSEYQLPYVLGSAHQG |
| | CLPPFPADVFMVPQYGYLTLNNGSQAVGRSSFYCLEYFPSQMLRTGNNFQFSYTFEDVPF |
| | HSSYAHSQSLDRLLNPLIDQYLYYLNKTQSNSGTLQQSRLLFSQAGPTSMSLQAKNWLPG |
| | PCYRQQRLSKQANDNNNSNFPWTAATKYHLNGRDSLVNPGPAMASHKDDEEKFFPMHGTL |
| | IFGKQGTNANDADLDNVMITDEEEIRTTNPVATEQYGYVSNNLQNSNTGPTTGTVNHQGA |
| | LPGMVWQDRDVYLQGPIWAKIPHTDGHFHPSPLMGGFGLKHPPPQIMIKNTPVPANPPTN |
| | FSSSKFASFITQYSTGQVSVEIEWELQKENSKRWNPEIQYTSNYNKSVNVDFTVDTNGVY |
| | SEPRPIGTRYPTRNL |
| 1328 | MAADGYLPDWLEDTLSEGIRQWWKLKPGPPPPKPAERHKDDSRGLVLPGYKYLGPFNGLD |
| | KGEPVNEADAAALEHDKAYDRQLDSGDNPYLKYNHADAEFQERLKEDTSFGGNLGRAVFQ |
| | AKKRVLEPLGLVEGPVKTAPGKKRPVEHSPAEPDSSSGTGKAGQQPARKRLNFGQTGDAD |
| | SVPDPQPLGQPPAAPSGLGSTTMATGSGAPMADNNEGADGVGNSSGNWHCDSQWLGDRVI |
| | TTSTRTWALPTYNNHLYKQISSQSGASNDNHYFGYSTPWGYFDFNRFHCHFSPRDWQRLI |
| | NNNWGFRPKRLNFKLFNIQVKEVTQNDGTTTIANNLTSTVQVFTDSEYQLPYVLGSAHQG |
| | CLPPFPADVFMVPQYGYLTLNNGSQAVGRSSFYCLEYFPSQMLRTGNNFQFSYTFEDVPF |
| | HSSYAHSQSLDRLMNPLIDQYLYYLNKTQSNSGTLQQSRLLFSQAGPTSMSLQAKNWLPG |
| | PCYRQQRLSKQANDNNNSNFPWTAATKYHLNGRDSLVNPGPAMASHKDDEEKFFPMHGTL |
| | IFGKQGTNANDADLDNVMITDEEEIRTTNPVATEQYGYVSNNLQNSNTGPTTGTVNHQGA |
| | LPGMVWQDRDVYLQGPIWAKIPHTDGHFHPSPLMGGFGLKHPPPQIMIKNTPVPANPPTN |
| | FSSAKFASFITQYSTGQVSVEIEWELQKENSKRWNPEIQYTSNYNKSVNVDFTVDINGVY |
| | SEPRPIGTRYLTRNL |
| 1329 | MAADGYLPDWLEDTLSEGTRQWWKLKPGPPPPKPAERHKDDSRGLVLPGYKYLGPFNGLD |
| | KGEPVNEADAAALEHDKAYDRQLDSGDNPYLKYNHADAEFQERLKEDTSFGGNLGRAVFQ |
| | AKKRVLEPLGLVEEPVKTAPGKKRPVEHSPAEPDSSSGTGKAGQQPARKRLNFGQTGDAD |
| | SVPDPQPLGQPPAAPSGLGSTTMATGSGAPMADNNEGADGVGNSSGNWHCDSQWLGDRVI |
| | TTSTRTWALPTYNNHLYKQISSQSGASNDNHYFGYSTPWGYFDFNRFHCHFSPRDWQRLI |
| | NNNWGFRPKRLNFKLFNIQVKEVTQNDGTTTIANNLTSTVQVFTDSEYQLPYVLGSAHQG |
| | CLPPFPADVFMVPQYGYLTLNNGSQAVGRSSFYCLEYFPSQMLRTGNNFQFSYTFEDVPF |
| | HSSYAHSQSLDRLMNPLIDQYLYYLNKTQSNSGTLQQSRLLFSQAGPTSMSLQAKNWLPG |
| | PCYRQQRLSKQANDNNNSNFPWTAATKYHLNGRDSLVNPGPAMASHKDDEEKFFPMHGTL |
| | IFGKQGTNANDADLDNVMITDEEEIRTTNPVATEQYGYVSNNLQNSNTGPTTGTVNHQGA |
| | LPGMVWQDRDVYLQGPIWAKIPHTDGHFHPSPLMGGFGLKHPPPQIMIKNTPVPANPPTN |
| | FSSAKFASFITQYSTGQVSVEIEWELQKENSKRWNPEIQYTSNYNKSVNVDFTVDTNGVY |
| | SEPRPIGTRYLTRNL |
| 1330 | MAADGYLPDWLEDTLSEGIRQWWKLKPGPPPPKPAERHKDDSRGLVLPGYKYLGPFNGLD |
| | KGEPVNEADAAALEHDKAYDRQLDSGDNPYLKYNHADAEFQERLKEDTSFGGNLGRAVFQ |
| | AKKRVLEPLGLVEEPVKTAPGKKRPVEHSPAEPDSSSGTGKAGQQPARKRLNFGQTGDAD |
| | SVPDPQPLGQPPAAPSGLGSTTMATGSGAPMADNNEGADGVGNSSGNWHCDSQWLGDRVI |
| | TTSTRTWAQPTYNNHLYKQISSQSGASNDNHYFGYSTPWGYFDFNRFHCHFSPRDWQRLI |
| | NNNWGFRPKRLNFKLFNIQVKEVTQNDGTTTIANNLTSTVQVFTDSEYQLPYVLGSAHQG |
| | CLPPFPADVFMVPQYGYLTLNNGSQAVGRSSFYCLEYFPSQMLRTGNNFQFSYTFEDVPF |
| | HSSYAHSQSLDRLMNPLIDQYLYYLNKTQSNSGALQQSRLLFSQAGPTSMSLQAKNWLPG |
| | PCYRQQRLSKQANDNNNSNFPWTAATKYHLNGRDSLVNPGPAMASHKDDEEKFFPMHGTL |
| | IFGKQGTNANDADLDNVMITDEEEIRTTNPVATEQYGYVSNNLQNSNTGPTTGTVNHRGA |
| | LPGMVWQDRDVYLQGPIWAKIPHTDGHFHPSPLMGGFGLKHPPPQIMIKNTPVPANPPTN |
| | FSSAKFASFITQYSTGQVSVEIEWELQKENSKRWNPEIQYTSNYNKSVNVDFTVDTNGVY |
| | SEPRPIGTRYLTRNL |
| 1331 | MAADGYLPDWLEDTLSEGIRQWWKLKPGPPPPKPAERHQDDSRGLVLPGYKYLGPFNGLD |
| | KGEPVNEADAAALEHDKAYDRQLDSGDNPYLKYNHADAEFQERLKEDTSFGGNLGRAVFQ |
| | AKKRVLEPLGLVEEPVKTAPGKKRPVEHSPVEPDSSSGTGKAGHQPARKRLNFGQTGDAD |
| | SVPDPQPLGQPPAAPTSLGSTTMATGSGAPMADNNEGADGVGNSSGNWHCDSQWLGDRVI |
| | TTSTRTWALPTYNNHLYKQISSQSGASNDNHYFGYSTPWGYFDFNRFHCHFSPRDWQRLI |
| | NNNWGFRPKRLNFKLFNIQVKEVTQNDGTTTIANNLTSTVQVFTDSEYQLPYVLGSAHQG |
| | CLPPFPADVFMVPQYGYLTLNNGSQAVGRSSFYCLEYFPSQMLRTGNNFTFSYTFEDVPF |
| | HSSYAHSQSLDRLMNPLIDQYLYYLNRTQSNSGTLQQSRLLFSQAGPTSMSLQAKNWLPG |
| | PCYRQQRLSKQANDNNNSNFPWTAATKYRLNGRDSLVNPGPAMASHKDDEEKFFPMHGTL |
| | IFGKQGTNANDADLEHVMITDEEEIRTTNPVATEQYGNVSNNLQNSNTGPTTENVNHQGA |
| | LPGMVWQDRDVYLQGPIWAKIPHTDGHFHPSPLMGGFGLKHPPPQIMIKNTPVPANPPTN |
| | FSSAKFASFITQYSTGQVSVEIEWELQKENSKRWNPEIQYTSNYNKSVNVDFTVDINGVY |
| | SEPRPIGTRYLTRNL |
| 1332 | MAADGYLPDWLEDTLSEGIRQWWKLKPGPPPPKPAERHQDDSRGLVLPGYKYLGPFNGLD |
| | KGEPVNEADAAALEHDKAYDRQLDSGDNPYLKYNHADAEFQERLKEDTSFGGNLGRAVFQ |
| | AKKRVLEPLGLVEEPVKTAPGKKRPVEHSPVEPDSSSGTGKAGHQPARKRLNFGQTGDAD |
| | SVPDPQPLGQPPAAPTSLGSTTMATGSGAPMADNNEGADGVGNSSGNWHCDSQWLGDRVI |
| | TTSTRTWALPTYNNHLYKQISSQSGASNDNHYFGYSTPWGYFDFNRFHCHFSPRDWQRLI |
| | NNNWGFRPKRLNFKLFNIQVKEVTQNDGTTTIANNLTSTVQVFTDSEYQLPYVLGSAHQG |
| | CLPPFPADVFMVPQYGYLTLNNGSQAVGRPSFYCLEYFPSQMLRTGNNFTFSYTFEDVPF |
| | HSSYAHSQSLDRLMNPLIDQYLYYLNRTQSNSGTLQQSRLLFSQAGPTSMSLQAKNWLPG |
| | PCYRQQRLSKQANDNNNSNFPWTAATKYHLNGRDSLVNPGPAMASHKDDEEKFFPMHGTL |
| | IFGKQGTNANDADLEHVMITDEEEIRTTNPVATEQYGNVSNNLQNSNTGPTTENVNHQGA |
| | LPGMVWQDRDVYLQGPIWAKIPHTDGHFHPSPLMGGFGLKHPPPQIMIKNTPVPANPPTN |
| | FSSAKFASFITQYSTGQVSVEIEWELQKENSKRWNPEIQYTSNYNKSVNVDFTVDTNGVY |
| | SEPRPIGTRYLTRNL |
| 1333 | MAADGYLPDWLEDTLSEGIRQWWKLKPGPPPPKPAERHQDDSRGLVLPGYKYLGPFNGLD |
| | KGEPVNEADAAALEHDKAYDRQLDSGDNPYLKYNHADAEFQERLKEDTSFGGNLGRAVFQ |
| | AKKRVLEPLGLVEEPVKTAPGKKRPVEHSPVEPDSSSGTGKAGHQPARKRLNFGQTGDAD |
| | SVPDPQPLGQPPAAPTSLGSTTMATGSGAPMADNNEGADGVGNSSGNWHCDSQWLGDRVI |
| | TTSTRTWALPTYNNHLYKQISSQSGASNDNHYFGYSTPWGYFDFNRFHCHFSPRDWQRLI |
| | NNNWGFRPKRLNFKLFNIQVKEVTQNDGTTTIANNLTSTVQVFTDSEYQLPYVLGSAHQG |
| | CLPPFPADVFMVPQYGYLTLNNGSQAVGRPSFYCLEYFPSQMLRTGNNFTFSYTFEDVPF |
| | HSSYAHSQSLDRLMNPLIDQYLYYLNRTQSNSGTLQQSRLLFSQAGPTSMSLQAKNWLPG |
| | PCYRQQRLSKQANDNNNSNFPWTAATKYHLNGRDSLVNPGPAMASHKDDEEKFFPMHGTL |
| | IFGKQGTNANDADLEHVMITDEEEIRTTNPVATEQYGNVSNNLQNSNTGPTTENVNHQGA |
| | LPGMVWQDRDVYLQGPIWAKIPHTDGHFHPSPLMGGFGLKHPPPQIMIKNTPVPANPPTN |
| | FSSAKFASFITQYSTGQVSVEIEWELQKENSKRWNPEIQYTSNYNKSVNVDFTVDINGVY |
| | SEPRPIGTRYLTRNL |
| 1334 | MAADGYLPDWLEDTLSEGIRQWWKLKPGPPPPKLAERHQDDSRGLVLPGYKYLGPFNGLD |
| | KGEPVNEADAAALEHDKAYDRQLDSGDNPYLKYNHADAEFQERLKEDTSFGGNLGRAVFQ |
| | AKKRVLEPLGLVEEPVKTAPGKKRPVEHSPVEPDSSSGTGKAGHQPARKRLNFGQTGDAD |
| | SVPDPQPLGQPPAAPTSLGSTTMATGSGAPMADNNEGADGVGNSSGNWHCDSQWLGDRVI |
| | TTSTRTWALPTYNNHLYKQISSQSGASNDNHYFGYSTPWGYFDFNRFHCHFSPRDWQRLI |
| | NNNWGFRPKRLNFKLFNIQVKEVTQNDGTTTIANNLTSTVQVFTDSEYQLPYVLGSAHQG |
| | CLPPFPADVFTVPQYGYLTLNNGSQAVGRSSFYCLEYFPSQMLRTGNNLTFSYTFEDVPF |
| | HSSYAHSQSLDRLMNPLIDQYLYYLNRTQSNSGTLQQSRLLFSQAGPTSMSLQAKNWLPG |
| | PCYRQQRLSKQANDNNNSNFPWTAATKYHLNGRDSLVNPGPAMASHKDDEEKFFPMHGTL |
| | IFGKQGTNANDADLEHVMITDEEEIRTTNPVATEQYGNVSNNLQNSNTGPTTENVNHQGA |
| | LPGMVWQDRDVYLQGPIWAKIPHTDGHFHPSPLMGGFGLKHPPPQIMIKNTPVPANPPTN |
| | YSSAKFASFITQYSTGQVSVEIEWELRKENSKRWNPEIQYTSNYNKSVNVDFTVDTNGVY |
| | SEPRPIGTRYLTRNL |
| 1335 | MAADGYLPDWLEDNLSEGIREWWDLKPGAPKPKANQQKQDDGRGLVLPGYKYLGPFNGLD |
| | KGEPVNAADAAALEHDKAYDQQLKAGDNPYLRYNHADAEFQERLQEDTSFGGNLGRAVFQ |
| | AKKRVLEPLGLVEEGAKTAPGKKRPVEQSPQEPDSSSGIGKTGQQPAKKRLNFGQTGDSE |
| | SVPDPQPLGEPPATPAAVGPTTMASGGGAPMADNNEGADGVGNASGNWHCDSTWLGDRVI |
| | TTSTRTWALPTYNNHLYKQISSTSTGASNDNHYFGYGTPWGYFDFNRFHCHFSPRDWQRL |
| | INNNWGFRPKRLNFKLFNIQVEEVTTNDGVTTIANNLTSTVQVFSDSEYQLPYVLGSAHQ |
| | GCLPPFPADVFMIPQYGYLTLNNGSQAVGRSSFYCLEYFPSQMLRTGNNFTFSYTFEEVP |
| | FHSSYAHSQSLDRLMNPLIDQYLYYLNRTQNQSGSAQNKDLLFSRGSPAGMSVQPKNWLP |
| | GPCYRQQRVSKTKTDNNNSNFTWTGASKYNLNGRESIINPGTAVASHKDDEDKFFPMSGV |
| | MIFGKESAGASSTALDNVMITDEEEIKATNPVATERFGTVAVNFQSSSTDPATGDVHAMG |
| | ALPGMVWQDRDVYLQGPIWAKIPHTDGHFHPSPLMGGFGLKNPPPQILIKNTPVPANPPA |
| | EFSATKFASFITQYSTGQVSVEIEWELQKENSKRWNPEVQYTSNYAKSANVDFTVDNNGL |
| | YTEPRPIGTRYLTRPL |
| 1336 | MAADGYLPDWLEDTLSEGIRQWWKLRPGPPPPKPAERHKDDSRGLVLPGYKYLGPFNGLD |
| | KGEPVNEADAAALEHDKAYDRQLDSGDNPYLKYNHADAEFQERLKEDTSFGGNLGRAVFQ |
| | AKKRVLEPLGLVEEGAETAPGKKRPVEQSPQGPDSSSGIGKTGQQPAKKRLNFGQTGDSE |
| | SVPDPQPLGEPPATPAAVGPTTMASGGGAPMADNNEGADGVGNASGNWHCDSTWLGDRVI |
| | TTSTRTWALPTYNNHLYKQISSASTGASNDNHYFGYSTPWGYFDFNRFHCHFSPRDWQRL |
| | INNNWGFRPKRLNFKLFNIQVKEVTTNDGVTTIANNLTSTVQVFSDSEYQLPYVLGSAHQ |
| | GCLPPFPADVFMIPQYGYLTLNNGSQAVGRSSFYCLEYFPSQMLRTGNNFTFSYTFEEVP |
| | FHSSYAHSQSLDRLMNPLIDQYLYYPNRTQNQSGSAQNKDLLFSRGSPAGMSVQPKNWLP |
| | GPCYRQQRVSKTKTDNNNSNFTWTGASKYNLNGRESIINPGTAMASHKDDEDKFFPMSGV |
| | MIFGKESAGASNTALDNVMITDEEEIKATNPVATERFGTVAVNFQSSSTDPATGDVHAMG |
| | ALPGMVWQGRDVYLQGPIWAKIPHTDGHFHPSPLMGGFGLKNPPPQILIKNTPVPANPPA |
| | EFSATKFASFITQYSTGQVSVEIEWELQKENSKRWNPEVQYTSNYAKSANVDFTVDNNGL |
| | YTEPRPIGTRYLTRPL |
| 1337 | MAADGYLPDWLEDTLSEGIRQWWKLKPGPPPPKPAERHKDDSRGLVLPGYKYLGPFNGLD |
| | KGEPVNEADAAALEHDKAYDRQLDSGDNPYLKYNHADAEFQERLKEDTSFGGNLGRAVFQ |
| | AKKRVLEPLGLVEEGAKTAPGKKRPVEQSPQEPDSPSGIGKTGQQPAKKRLNFGQTGDSE |
| | SVPDPQPLGEPPATPAAVGPTTMASGGGAPMADNNEGADGVGNASGNWHCDSTWLGDRVI |
| | TTSTRTWALPTYNNHLYKQISSASTGASNDNHYFGYSTPWGYFDFNRFHCHFSPRDWQRL |
| | INNNWGFRPKRLNFKLFNIQVKEVTTNDGVTTIANNLTSTVQVFSDSEYQLPYVLGSAHQ |
| | GRLPPFPADVFMIPQYGYLTLNNGSQAVGRSSSYCLEYFPSQMLRTGNNFTFSYTFEEVP |
| | LHSSCAHSQSLDRLMNPLIDQYLYYLNRTQNQSGSAQNRDLLFSRGSPAGMSVQPKNWLP |
| | GPCYRQQRVSKTKTDNNNSNFTWTGASKYNLNGRESIINPGTAMASHKDDEDKFFPMSGV |
| | MIFGKESAGASNTALDNVMITDEEEIKATNPVATERFGTVAVNFQSSSTDPATGDVHAMG |
| | ALPGMVWQDRDVYLQGPIWAKIPHTDGHFHPSPLMGGFGLKNPPPQILIKNTPVPANPPA |
| | EFSATKFASFITQYSAGQVSVEIEWELQKENSKRWNPEVQYTSNYAKSANVDFTVDNNGL |
| | YTEPRPIGTRYLTRPL |
| 1338 | MAADGYLPDWLEDNLSEGIREWWDLKPGAPKPKANQQKQDDGRGLVLPGYKYLGPFNGLD |
| | KGEPVNAADAAALEHDKAYDQQLKAGDNPYPRYNHADAEFQERLQEDTPFGGNLGRAVFQ |
| | AKKRVLEPLGLVEEAAKTAPGKKRPVEPSPQRSPDSSTGIGKKGQQPAKKRLNFGQTGDS |
| | ESVPDPQPIGEPPAGPSGLGSGTMAAGGGAPMADNNEGADGVGNASGNWHCDSTWLGDRV |
| | ITTSTRTWALPTYNNHLYKQISSASTGASNDNHYFGYSTPWGYFDFNRFHCHFSPRDWQR |
| | LINNNWGFRPKRLNFKLFNIQVKEVTTNDGVTTIANNLTSTVQVFSDSEYQLPYVLGSAH |
| | QGCLPPFPADVFMIPQYGYLTLNNGSQAVGRSSFYCLEYFPSQMLRTGNNFTFSYTFEEV |
| | PLHSSYAHSQSLDRLMNPLIVQYLYYLNRTQNQSGSAQNKDLLFSRGSPAGMSVQPKNWL |
| | PGPCYRQQRVSKTKTDNNNSNFTWTGASKYNLNGRESIINPGTAMASHKDDEDKFFPMSG |
| | VMIFGKESAGASNTALDNVMITDEEEIKATNPVATERFGTVAVNFQSSSTDPATGDVHAM |
| | GALPGMVWQDRDVYLQGPIWAKIPHTDGHFHPSPLMGGFGLKNPPPQILIKNTPVPANPP |
| | AEFSATKFASFITQYSTGQVSVEIEWELQKENSKRWNPEVQYTSNYAKSASVDFTVDNNG |
| | LYTEPRPIGTRYLTRPL |
| 1339 | MAADGYLPDWLEDNLSEGIREWWDLKPGAPKPKANQQKQDDGRGLVLPGYKYLGPFNGLD |
| | KGEPVNAADAAALEHDKAYDQQLKAGDNPYLRYNHADAEFQERLQEDTSFGGNLGRAVFQ |
| | AKKRVLEPLGLVEEAAKTAPGKKRPVEPSPQRSPDSSTGIGKKGQQPAKKRLNFGQTGDS |
| | ESVPDPQPIGEPPAGPSGLGSGTMAAGGGAPMADNNEGADGVGSSSGNWHCDSTWLGDRV |
| | ITTSTRTWALPTYNNHLYKQISNGTSGGSTNDNTYFGYSTPWGYFDFNRFHCHFSPRDWQ |
| | RLINNNWGFRPKRLSFKLFNIQVKEVTQNEGTKTIANNLTSTIQVFTDSEYQLPYVLGSA |
| | HQGCLPPFPADVFMIPQYGYLTLNNGSQAVGRSSFYCLEYFPSQMLRTGNNFEFSYTFED |
| | VPFHSSYAHSQSLDRLMNPLIDQYLYYLSRTQSTGGTQGTQQLLFSQAGPANMSAQAKNW |
| | LPGPCYRQQRVSTTLSQNNNSNFAWTGATKYHLNGRDSLVNPGVAMATHKDDEERFFPSS |
| | GVLMFGKQGAGRDNVDYSSVMLTSEEEIKTTNPVATEQYGVVADNLQQTNTGPIVGNVNS |
| | QGALPGMVWQNRDVYLQGPIWAKIPHTDGNCHPSPLMGGFGLKHPPPQILIKNTPVPADP |
| | PTTFSQAKLASFITQYSTGQVSVEIEWELQKENSKRWNPEIQYTSNYYKSTNVDFAVNTE |
| | GTYSEPRPIGTRYLTRNL |
| 1340 | MAADGYLPDWLEDNLSEGIREWWDLKPGAPKPKANQQKQDDGRGLVLPGYKYLGPFNGLD |
| | KGEPVNAADAAALEHDKAYDQQLKAGDNPYLRYNHADAEFQERLQEDTSFGGNLGRAVFQ |
| | AKKRVLEPLGLVEEGAKTAPGKKRPVEQSPQEPDSSSGIGKTGQQPAKKRLNFGQTGDSE |
| | SVPDPQPLGEPPATPAAVGPTTMASGGGAPMADNNEGADGVGNASGNWHCDSTWLGDRVI |
| | TTSTRTWALPTYNNHLYKQISSASTGASNDNHYFGYSTPWGYFDFNRFHCHFSPRDWQRL |
| | INNNWGFRPKRLNFKLFNIQVKEVTTNDGVTTIANNLTSTVQVFSDSEYQLPYVLGSAHQ |
| | GCLPPFPADVFMIPQYGYLTLNNGSQAVGRSSFYCLEYFPSQMLRTGNNFTFSYTFEEVP |
| | FHSSYAHSQSLDRLMNPLIDQYLYYLNRTQNQSGSAQNKDLLFSRGSPAGMSVQPKNWLP |
| | GPCYRQQRVSKTKTDNNNSNFTWTGASKYNLNGRESIINPGTAMASHKDDEDKFFPMSGV |
| | MIFGKESAGASNTALDNVMITDEEEIKATNPVATERFGTVAVNFQSSSTDPATGDVHAMG |
| | ALPGMVWQDRDVYLQGPIWAKIPHTDGHFHPSPLMGGFGLKNPPPQILIKNTPVPANPPA |
| | EFSATKFASFITQYSTGQVSVEIEWELQKENSKRWNPEVQYTSNYAKSANVDFTVDNNGL |
| | YTEPRPIGTRYLTRPL |
| 1341 | MAADGYLPDWLEDNLSEGIREWWDLKPGAPKPKANQQKQDDGRGLVLPGYKYLGPFNGLD |
| | KGEPVNAADAAALEHDKAYDQQLEAGDNPYLRYNHADAEFQERLQEDTSFGGNLGRAVFQ |
| | AKKRVLEPLGLVEEGAKTAPGKKRPVEQSPQEPDSSSGIGKKGQQPARKRLNFGQTGDSE |
| | SVPDPQPLGEPPAAPSGVGPNTMAAGGGAPMADNNEGADGVGSSSGNWHCDSTWLGDRVI |
| | TTSTRTWALPTYNNHLYKQISNGTSGGATNDNTYFGYSTPWGYFDFNRFHCHFSPRDWQR |
| | LINNNWGFRPKRLSFKLFNIQVKEVTQNEGTKTIANNLTSTIQVFTDSEYQLPYVLGSAH |
| | QGCLPPFPADVFMIPQYGYLTLNNGSQAVGRSSFYCLEYFPSQMLRTGNNFQFTYTFEDV |
| | PFHSSYAHSQSLDRLMNPLIDQYLYYLSRTQTTGGTANTQTLGFSQGGPNTMANQAKNWL |
| | PGPCYRQQRVSTTTGQNNNSNFAWTAGTKYHLNGRNSLANPGIAMATHKDDEERFFPVTG |
| | SCFWQQNAARDNADYSDVMLTSEEEIKTTNPVATEEYGIVADNLQQQNTAPQIGTVNSQG |
| | ALPGMVWQNRDVYLQGPIWAKIPHTDGNFHPSPLMGGFGLKHPPPQILIKNTPVPADPPT |
| | TFNQSKLNSFITQYSTGQVSVEIEWELQKENSKRWNPEIQYTSNYYKSTSVDFAVNTEGV |
| | YSEPRPIGTRYLTRNL |
| 1342 | MAADGYLPDWLEDTLSEGIRQRWKLKPGPPPPEPAERHKDDSRGLVLPGYKYLGPFNGLD |
| | KGEPVNEADAAALEHDKAYDRQLDSGDNPYLKYNHADAEFQERLKEDTSFGGNLGRAVFQ |
| | AKKRVLEPLGLVEEPVKTAPGKKRPVEHSPVEPDSSSGTGKAGQQPARKRLNFGQTGDAD |
| | SVPDPQPLGQPPAAPSGLGTNTMATGSGAPMADNNEGADGVGNSSGNWHCDSTWMGDRVI |
| | TTSTRTWALPTYNNHLYKQISSQSGASNDNHYFGYSTPWGYFDFNRFHCHFSPRDWQRLI |
| | NNNWGFRPKRLNFKLFNIQVKEVTQNDGTTTIANNLTSTVQVFTDSEYQLPYVLGSAHQG |
| | CLPPFPADVFMVPQYGYLTLNNGSQAVGRSSFYCLEYFPSQMLRTGNNFTFSYTFEDVPF |
| | HSSYAHSQSLGRLMNPLIDQYLYYLSRTNTPSGTTTQSRLQFSQAGASDIRDQSRNWLPG |
| | PCYRQQRVSKTSADNNNSEYSWTGATKYHLNGRDSLVNPGPAMASHKDDEEKFFPQSGVL |
| | IFGKQGSEKTNVDIEKVMITDEEEIRTTNPVATEQYGSVSTNLQRGNRQAATADVNTQGV |
| | LPGMVWQDRDVYLQGPIWAKIPHTDGHFHPSPLMGGFGLKHPPPQILIKNTPVPANPSTT |
| | FSAAKFASFITQYSTGQVSVEIEWELQKENSKRWNPEIQYTSNYNKSVNVDFTVDTNGVY |
| | SEPRPIGTRYLTRNL |
| 1343 | MAADGYLPDWLEDTLSEGIRQWWKLKPGPPPPKPAERHKDDSRGLVLPGYKYLGPFNGLD |
| | KGEPVNEADAAALEHDKAYDRQLDSGDNPYLKYNHADAEFQERLKEDTSFGGNLGRAVFQ |
| | AKKRVLEPLGLVEEPVKTAPGKKRPVEHSPVEPDSSSGTGKAGQQPARKRLNFGQTGDAD |
| | SVPDPQPLGQPPAAPSGLGSTTMATGSGAPMADNNEGADGVGNSSGNWHCDSQWLGDRVI |
| | TTSTRTWALPTYNNHLYKQISSQSGASNDNHYFGYSTPWGYFDFNRFHCHFSPRDWQRLI |
| | NNNWGFRPKRLNFKLFNIQVKEVTQNDGTTTIANNLTSTVQVFTDSEYQLPYVLGSAHQG |
| | CLPPFPADVFMVPQYGYLTLNNGSQAVGRSSFYCLEYFPSQMLRTGNNFQFSYTFEDVPF |
| | HSSYAHSQSLDRLMNPLVDQYLYYLNKTQTNSGTLQQSRLLFSQAGPTNMSLQAKNWLPG |
| | PCYRQQRLSKQANDNNNSNFPWTAATKYHLNGRDSLVNPGPAMASHKDDEEKFFPMHGTL |
| | IFGKQGTNANDADLENVMITDEEEIRTTNPVATEQYGTVSNNLQNSNTGPTTGTVNHQGA |
| | LPGMVWQDRDVYLQGPIWAKIPHTDGHFHPSPLMGGFGLKHPPPQIMIKNTPVPANPPTN |
| | FSSAKFASFITQYSTGQVSVEIEWELQKENSKRWNPEIQYTSNYNKSVNVDFTVDTNGVY |
| | SEPRPIGTRYLTRNL |
| 1344 | MAADGYLPDWLEDTLSEGIRQWWKLKPGPPPPKPAERHKDDSRGLVLPGYKYLGPFNGLD |
| | KGEPVNEADAAALEHDKAYDRQLDSGDNPYLKYNHADAEFQERLKEDTSFGGNLGRAVFQ |
| | AKKRVLEPLGLVEEPVKTAPGKKRPVEHPPVEPDSSSGTGKAGQQPARKRLNFGQTGDAD |
| | SVPDPQPLGQPPAAPSGLGSTTMATGSGAPMADNNEGADGVGNSSGNWHCDSQWLGDRVI |
| | TTSTRTWALPTYNNHLYKQISSQSGASNDNHYFGYSTPWGYFDFNRFHCHFSPRDWQRLI |
| | NNNWGFRPKRLNFKLFNIQVKEVTQNDGTTTIANNLTSTVQVFTDSEYQLPYVLGSAHQG |
| | CLPPFPADVFMVPQYGYLTLNNGSQAVGRSSFYCLEYFPSQMLRTGNNFQFSYTFEDVPF |
| | HSSYAHSQSLDRLMNPLIDQYLYYLNKTQTNSGTLQQSRLLFSQAGPTNMSLQAKNRLPG |
| | PCYRQQRLSKQANDNNNSNFPWTAATKYHLNGRDSLVNPGPAMASHKDDEEKFFPMHGTL |
| | IFGKQGTNANDADLENVMITDEEEIRTTNPVATEQYGTVSNNLQNSNTGPTTGTVNHQGA |
| | LPGMVWQDRDVYLQGPIWAKIPHTDGHFHPSPLVGGFGLKHPPPQIMIKNTPVPANPPTN |
| | FSSAKFASFITQYSTGQVSVEIEWELQKENSKRWNPEIQYTSNYNKSVNVDFTVDTNGVY |
| | SEPRPIGTRYLTRNL |
| 1345 | MAADGYLPDWLEDTLSEGIRQWWKLKPGPPPPKPAERHKDDSRGLVLPGYKYLGPFNGLD |
| | KGEPVNEADAAALEHDKAYDRQLDSGDNPYLKYNHADAEFQERLKEDTSFGGNLGRAVFQ |
| | AKKRVLEPLGLVEEPVKTAPGKKRPVEHSPAEPDSSSGTGKAGQQPARKRLNFGQTGDAD |
| | SVPDPQPLRQPPAAPTSLGSTTMATGSGAPMADNNEGADGVGNSSGNWHCDSQWLGDRVI |
| | TTSTRTWALPTYNNHLYKQISSQSGASNDNHYFGYSTPWGYFDFNRFHCHFSPRDWQRLI |
| | NNNWGFRPKRLNFKLFNIQVKEVTQNDGTTTIANNLTSTVQVFTDSEYQLPYVLGSAHQG |
| | CLPPFPADVFMVPQYGYLTLNNGSQAVGRSSFYCLEYFPSQMLRTGNNFQFSYTFEDVPF |
| | HSSYAHSQSLDRLMNPLIDQYLYYLNRTQTASGTQQSRLLFSQAGPTSMSLQAKNWLPGP |
| | CYRQQRLSKQANDNNNSNFPWTGATKYYLNGRDSLVNPGPAMASHKDDEEKFFPMHGTLI |
| | FGKEGTNATNAELENVMITDEEEIRTTNPVATEQYGYVSNNLQNSNTAASTETVNHQGAL |
| | PGMVWQDRDVYLQGPIWAKIPHTDGHFHPSPLMGGFGLKHPPPQIMIKNTPVPANPPTNF |
| | SSAKFASFITQYSTGQVSVEIEWELQKENSKRWNPEIQYTSNYNKSVNVDFTVDINGVYS |
| | EPRPIGTRYLTRNL |
| 1346 | MAADGYLPDWLEDTLSEGIRQWWKLKPGPPPPKPAERHKDDSRGLVLPGYKYLGPFNGLD |
| | KGEPVNEADAAALEHDKAYDRQLDSGDNPYLKYNHADAEFQERLKEDTSFGGNLGRAVFQ |
| | AKKRVLEPLGLVEEPVKTAPGKKRPVEHSPAEPDSSSGTGKAGQQPARKRLNFGQTGDAD |
| | SVPDPQPLGQPPAAPTSLGSTTMATGSGAPMADNNEGADGVGNSSGNWHCDSQWLGDRVI |
| | TTSTRTWALPTYNNHLYKQISSQSGASNDNHYFGYSTPWGYFDFNRFHCHFSPRDWQRLI |
| | NNNWGFRPKRLNFKLFNIQVKEVTQNDGTTTIANNLTSTVQVFTDSEYQLPYVLGSAHQG |
| | CLPPFPADVFMVPQYGYLTLNNGSQAVGRSSFYCLECFPSQMLRTGNNFQFSYTFEDVPF |
| | HSSYAHSQSLDRLMNPLIDQYLYYLNRTQTASGTQQSRLLFSQAGPTSMSLQAKNWLPGP |
| | CYRQQRLSKQANDNNNSNFPWTGATKYHLNGRDSLVNPGPAMASHKDDEEKFFPMHGTLI |
| | FGKEGTNATNAELENVMITDEEEIRTTNPVATEQYGYVSNNLQNSNTAASTETVNHQGAL |
| | PGMVWQDRDVYLQGPIWAKIPHTDGHFHPSPLMGGFGLKHPPPQIMIKNTPVPANPPTNF |
| | SSAKFASFITQYSTGQVSVEIEWELQKENSKRWNPEIQYTSNYNKSVNVDFTVDTNGVYS |
| | EPRPIGTRYLTRNL |
| 1347 | MAADGYLPDWLEDTLSEGIRQWWKLKPGPPPPKPAERHKDDSRGLVLPGYKYLGPFNGLD |
| | KGEPVNEADAAALEHDKAYDRQLDSGDNPYLKYNHADAEFQERLKEDTSFGGNLGRAVFQ |
| | AKKRVLEPLGLVEEPVKTAPGKKRPVEHSPAEPDSSSGTGKAGQQPARKRLNFGQTGDAD |
| | SVPDPQPLGQPPAAPTSLGSTTMATGSGAPMADNNEGADGVGNSSGNWHCDSQWLGDRVI |
| | TTSTRTWALPTYNNHLYKQISSQSGASNDNHYFGYSTPWGYFDFNRFHCRFSPRDWQRLI |
| | NNNWGFRPKRLNFKLFNIQVKEVTQNDGTTTIANNLTSTVQVFTDSEYQLPYVLGSAHQG |
| | CLPPFPADVFMVPQYGYLTLNNGSQAVGRSSFYCLEYFPSQMLRTGNNFQFSYTFEDVPF |
| | HSSYAHSQGLDRLMNPLIDQYLYYLNRTQTASGTQQSRLLFSQAGPTSMSLQAKNWLPGP |
| | CYRQQRLSKQANDNNNSNFPWTGATKYHLNGGDSLVNPGPAMASHKDDEEKFFPMHGTLI |
| | FGKEGTNATNAELENVMITDEEEIRTTNPVATEQYGYVSNNLQNSNTAASTETVNHQGAL |
| | PGMVWQDRDVYLRGPIWAKIPHADGHFHPSPLMGGFGLKHPPPQIMIKNTPVPANPPTNF |
| | SSAKFASFITQYSTGQVSVEIEWELQKENSKRWNPEIQYTSNYNKSVNVDFTVDINGVYS |
| | EPRPIGTRYLTRNL |
| 1348 | MAADGYLPDWLKDTLSEGIRQWWKLKPGPPPPKPAERHKDDSGGLVLPGYKYLGPFNGLD |
| | KGEPVNEADAAALEYDKAYDRQLDSGDNPYLKYNHADAEFQERLKEDTSFGGNLGRAVFQ |
| | AKKRVLEPLGLVEEPVKTAPGKKRPVEHSPVEPDSSSGTGKAGQQPARKRLNFGQTGDAD |
| | SVPDPQPLGQPPAAPSGLGTNTMATGSGAPMADNNEGADGVGNSSGSWHCDSTWMGDRVI |
| | TTSTRTWALPTYNNHLYKQISSQSGASNDNHYFGYSTPWGYFDFNRFHCHFSPRDWQRLI |
| | NNNWGFRPKRLNFKLFNIQVKEVTQNDGTTTIANNLTSTVQVFTDSEYQLPYVPGSAHQG |
| | CLPPFPADVFMVPQYGYLTLNNGSQAVGRSSFYCLEYFPSQMLRTGNNFTFSYTFEDVPF |
| | HSSYAHSQSLDRLMNPLIDQYLYYLSRTNTPSGTTTQSRLQFSQAGASDIRDQSRNWLPG |
| | PCYRQQRVSKTAADNNNSEYSWTGATKYHLNGRDSLVNPGPAMASHKDDEEKFFPQSGVL |
| | IFGKQGSEKTNVDIEKVMITDEEEIRTTNPVATEQYGSVSTNLQSGNTQAATADVNTQGV |
| | LPGMVWQDRDVHLQGPIWAKIPHTDGHFHPSPLMGGFGLKHPPPQILIKNTPVPANPSTT |
| | FSAAKFASFITQYSTGQVSVEIEWELQKENSKRWNPEIQYTSNYNKSVNVDFTVDINGVY |
| | SEPRPIGTRYLTRNL |
| 1349 | MAADGYLPDWLEDTLSEGIRQWWKLKPGPPPPKPAERHKDDSRGLVLPGYKYLGPFNGLD |
| | KGEPVNEADAAALEHDKAYDRQLDSGDNPYLKYNHADAEFQERLKEDTSFGGNLGRAVFQ |
| | AKKRVLEPLGLVGEPVKTAPGKKRPVEHSPVEPDSSSGTGKAGQQPARKRLNFGQTGDAD |
| | SVPDPQPLGQPPAAPSGLGTNTMATGSGAPMADNNEGADGVGNSSGNWHCDSTWMGDRVI |
| | TTSTRTWALPTYNNHLYKQISSQSGASNDNHYFGYSTPWGYFDFNRFHCHFSPRDWQRLI |
| | NNNWGFRPKRLNFKLFNIQVKEVTQNDGTTTIANNLTSTVQVFTDSEYQLPYVLGSAHQG |
| | CLPPFPADVFMVPQYGYLTLNNGSQAVGRSSFYCLEYFPSQMLRTGNNFTFSYTFEDVPF |
| | HSGYAHSQSLDRLMNPLIDQYLYYLSTTNTPSGTTTQSRLQFSQAGASDIRDQSRNWLPG |
| | PCYRQQRVSKTSADNNNSEYSWTGATKYHLNGRDSLVNPGPAMASHKDNEEKFFPQSGVL |
| | IFGKQGSEKTNVDIEKVMITDEEEIRTTNPVATEQYGSVSTNLQRGNRQAATADVNTQGV |
| | LPGMVWQDRDVYLQGPIWAKIPHTDGHFHPSPLMGGFGLKHPPPQILIKNTPVPANPSTT |
| | FSAAKFASFITQYSTGQVSVEIEWELQKENSKRWNPEIQYTSNYNKSVNVDFTVDTNGVY |
| | SEPRPIGTRYLTRNL |
| 1350 | MAADGYLPDWLEDTLSEGIRQWWKLKPGPPPPKPAERHKDDSRGLVLPGYKYLGPFNGLD |
| | KGEPVNEADAAALEHDKAYDRQLDSGDNPYLKYNHADAEFQERLKEDTSFGGNLGRAVFQ |
| | AKKRVLEPLGLVGEPVKTAPGKKRPVEHSPVEPDSSSGTGKAGQQPARKRLNFGQTGDAD |
| | SVPDPQPLGQPPAAPSGLGTNTMATGSGAPMADNNEGADGVGNSSGNRHCDSTWMGDRVI |
| | TTSTRTWALPTYNNHLYRQISSQSGASNDNHYFGYSTPWGYFDFNRFHCHFSPRDWQRLI |
| | NNNWGFRPKRLNFKLFNIQVKEVTQNDGTTTIANNLTSTVQVFTDSEYQLPYVLGSAHQG |
| | CLPPFPADVFMVPQYGYLTLSNGSQAVGRSSFYCPEYFPSQMLRTGNNFTFSYTFEDVPF |
| | HSSYAHSQSLDRLMNPLIDQYLYYLSTTNTPSGTTTQSRLQFSQAGASDIRDQSRNWLPG |
| | PCYRQQRVSKTSADNNNSEYSWTGATKYHLNGRDSLVNPGPAMASHKDNEEKFFPQSGVL |
| | IFGKQGSEKTNVDIEKVMITDEEEIRTTNPVATEQYGSVSTNLQRGNRQAATADVNTQGV |
| | LPGMVWQDRDVYLQGPIWAKIPHTDGHFHPSPLMGGFGPKHPPPQILIKNTPVPANPSTT |
| | FSAAKFASFITQYSTGQVSVEIEWELQKENSKRWNPEIQYTSNYNKSVNVDFTVDTNGVY |
| | SEPRPIGTRYLTRNL |
| 1351 | MAADGYLPDWLEDTLSEGIRQWWKLKPGPPPPKPAERHKDDSRGLVLPGYKYLGPFNGLD |
| | KGEPVNEADAAALEHDKAYDRQLDSGDNPYLKYNHADAEFQERLKEDTSFGGNLGRAVFQ |
| | AKKRVLEPLGLVEEPVKTAPGKKRPVEHSPVEPDSSSGTGKAGNQPARKRLNFGQTGDAD |
| | SVPDPQPLGQPPASPSGLGTNTMATGSGAPMADNNEGADGVGNSSGNWHCDSTWMGDRVV |
| | TTSTRTWALPTYNNHLYKQISSQSGASNDNHYFGYSTPWGYFDFNRFHCHFSPRDWQRLI |
| | NNNWGFRPKRLNFKLFNIQVKEVTQNDGTTTIANNLTSTVQVFTDLEYQLPYVLGSAHQG |
| | CLPPFPADVFMVPQYGYLTLNNGSQAVGRSSFYCLEYFPSQMLRTGNNFTFSYTFEDVPF |
| | HSSYAHSQSLDRLMNPLIDQYLYYLSRTNTPSGTTTQSRLQFSQAGASDIRDQSRNWLPG |
| | PCYRQQRVSKTAADNNNSEYSWTGATKYHLNGRDSLVNPGPAMASHKDDEEKFFPQSGVL |
| | IFGKQGSEKTNVDIEKVMITDEEEIRTTNPVATEQYGSVSTNLQSGNTQAATSDVNTQGV |
| | LPGMVWQDRDVYLQGPIWAKIPHTDGHFHPSPLMGGFGLKHPPPQILIKNTPVPANPSTT |
| | FSAAKFASFITQYSTGQVSVEIEWELQKENSKRWNPEIQYTSNYNKSVNVDFTVDINGVY |
| | SEPRPIGTRYLTRNL |
| 1352 | MAADGYLPDWLEDTLSEGIRQWWKLKPGPPPKPAERHKDDSRGLVLPGYKYLGPFNGLDK |
| | GEPVNEADAAALEHDKAYDRQLDSGDNPYLKYNHADAEFQERLKEDTSFGGNLGRAVFQA |
| | KKRVLEPLGLVEEPVKTAPGKKRPVEHSPVEPDSSSGTGKAGNQPARKRLNFGQTGDADS |
| | VPDPQPLGQPPAAPSGLGTNTMATGSGAPMADNNEGADGVGNSSGDWHCDSTWMGDRVIT |
| | TSTRTWALPTYNNHLYKQISSQSGASNDNHYFGYSTPWGYFDFNRFHCHFSPRDWQRLIN |
| | NNWGFRPKRLNLKLFNIQVKEVTQNDGTTTIANNLTSTVQVFTDLEYQLPYVLGSAHQGC |
| | LPPFPADVFMVPQYGYLTLNNGSQAVGRSSFYCLEYFPSQMLRTGNNFTFSYTFEDVPFH |
| | SSYAHSQSLDRLMNPLIDQYLYYLSRTNTPSGTTTQSRLQFSQAGASDIRDQSRNWLPGP |
| | CYRQQRVSKTAADNNNGEYSWTGATKYHLNGRDSLVNPGPAMASHKDDEEKFFPQSGVLI |
| | FGKQGSEKTNVDIEKVMITDEEEIRTTNPVATEQYGSVSTNLQSGNTRAATSDVNTQGVL |
| | PGMVWQDRDVYLQGPIWAKIPHTDGHFHPSPLMGGFGLKHPPPQILIKNTPVPANPSTTF |
| | SAAKFASFITQYSTGQVSVEIEWELQKENSKRWNPEIQYTSNYNKSVNVDFTVDINGVYS |
| | EPRPIGTRYLTRNL |
| 1353 | MAADGYLPDWLEDTLSEGIRQWWKLKPGPPPPKPAERHKDDSRGLVLPGYKYLGPFNGLD |
| | KGEPVNEADAAALEHDKAYDRQLDSGDNPYLKYDHADAEFQERLKEDTSFGGNLGRAVFQ |
| | AKKRVLEPLGLVEEPVKTAPGKKRPVEHSPVEPDSSSGTGKAGNQPARKRLNFGQTGDAD |
| | SVPDPQPLGQPPAAPSGLGTNTMATGSGAPMADNNDGADGVGNSSGNWHCDSTWMGDRVI |
| | TTSTRTWALPTYNNHLYKQISSQSGASNDNHYFGYSTPWGYFDFNRFHCHFSPRDWQRLI |
| | NNNWGFRPKRLNFKLFNIQVREVTQNDGTTTIANNLTSTVQVFTDSEYQLPYVLGSAHQG |
| | CLPPFPADVFMVPQYGYLTLNNGSQAVGRSSFYCLEYFPSQMLRTGNNFTFSYTFEDVPF |
| | HSSYAHSQSLDRLMNPLIDQYLYYLSRTNTPSGTTTQSRLQFSQAGASDIRDQSRNWLPG |
| | PCYRQQRVSKTSADNNNSEYSWIGATKYHLNGRDSLVNPGPAMASHKDDEEKFFPQSGVL |
| | IFGKQGSEKTNVDIEKVMITDEEEIRTTNPVATEQYGSVSTNLQSGNTQASTADVNTQGV |
| | LPGMVWQDRDVYLQGPIWAKIPHTDGHFHPSPLMGGFGLKHPPPQILIKNTPVPANPSTT |
| | FSAAKFASFITQYSTGRVSVEIEWELQKENSKRWNPEIQYTSNYNKSVNVDFTVDINGVY |
| | SEPRPIGTRYLTRNL |
| 1354 | MAADGYLPDWLEDTLSEGIRQWWKLKPGPPPPKPAERHKDDSRGLVLPGYKYLGPFNGLD |
| | KGEPVNEADAAALEHDKAYDRQLDSGDNPYPKYNHADAEFQERLKEDTSFGGNLGRAVFQ |
| | AKKRVLEPLGLVEEPVKTAPGKKRPVEHSPAEPDSSSGTGKAGQQPARKRLNFGQTGDAD |
| | SVPDPQPLGQPPAAPSGLGTNTMATGSGAPMADNNEGADGVGNSSGNWHCDSTWMGDRVI |
| | TTSTRTWALPTYNNHLYKQISSQSGASNDNHYFGYSTPWGYFDFNRFHCHFSPRDWQRLI |
| | NNNWGFRPKRLNFKLFNIQVKEVTQNDGTTTIANNLTSTVQVFTDSEYQLPYVLGSAHQG |
| | CLPPFPADVFMVPQYGYLTLNNGSQAVGRSSFYCLEYFPSQMLRTGNNFTFSYTFEDVPF |
| | HSSYAHSQSLDRLMNPLIDQYLYYLSRTNTPSGTTTQSRLQFSQAGASDIRDQSRNWLPG |
| | PCYRQQRVSKTSADNNNSEYSWTGATKYHLNGRDSLVNPGPAMASHKDDEEKFFPQSGVL |
| | IFGKQDSGKTNVDIEKVMITDEEEIRTTNPVATEQYGSVSTNLQSGNTQAATSDVNTQGV |
| | LPGMVWQDRDVYLQGPIWAKIPHTDGHFHPSPLMGGFGLKHPPPQILIKNTPVPANPSTT |
| | FSAAKFASFITQYSTGQVSVEIEWELQKENSKRWNPEIQYTSNYNKSVNVDFTVDINGVY |
| | SEPRPIGTRYLTRNL |
| 1355 | MAADGYLPDWLEDTLSEGIRQWWKLKPGPPPPKPAERHKDDSRGLVLPGYKYLGPFNGLD |
| | KGEPVNEADAAALEHDKAYDRQLDGGDNPYLKYNHADAEFQERLKEDTSFGGNLGRAVFQ |
| | AKKRVLEPLGLVEEPVKTAPGKKRPVEHSLAEPDSSSGTGKAGQQPARRRLNFGQTGDAD |
| | SVPDPQPLGQPPAAPSGLGTNTMATGSGAPMADNNEGADGVGNSSGNWHCDSTWMGDRVI |
| | TTSTRTWALPTYNNHLYRQISSQSGASNDNHYFGYSTPWGYFDFNRFHCHFSPRDWQRLI |
| | NNNWGSRPKRLNFKLFNIQVKEVTQNDGTTTIANNLTSTVQVFTDSEYQLPYVLGSAHQG |
| | CLPPFPADVFMVPQYGYLTLNNGSQAVGRSSFYCLEYFPSQMLRTGNNFTFSYTFEDVPF |
| | HSSYAHSQSLDRLMNPLVDQYLYYLSRTNTPSGTTTQSRLQFSQAGASDIRDQSRNWLPG |
| | PCYRQQRVSKTSADNNNSEYSWTGATKYHLNGRDSLVNPGPAMASHKDDEEKFFPQSGVL |
| | IFGKQDSGKTNVDIEKVMITDEEEIRTTNPVATEQYGSVSTNLQSGNTQAATSDVNTQGV |
| | LPGMVWQDRDVYLQGPIWAKIPHTDGHFHPSPLMGGFGLKHPPPQILIKNTPVPANPSTT |
| | FSAAKFASFITQYSTGQVSVEIEWELQKENSKRWNPEIQYTSNYNKSVNVDFTVDTNGVY |
| | SEPRPIGTRYLTRNL |
| 1356 | MAADGYLPDWLEDNLSEGIREWWDLKPGAPKPKANQQKQDDGRGLVLPGYKYLGPFNGLD |
| | KGEPVNAADAAALEHDKAYDQQLKAGDNPYLRYNHADAEFQERLQEDTSFGGNLGRAVFQ |
| | AKKRVLEPLGLVEEAAKTAPGKKRPVEPSPQRSPDSSAGIGKKGQQPAKKRLNFGQTGDS |
| | ESVPDPQPIGEPPAGPSGLGSGTMAAGGGAPMADNNEGADGVGSSSGNWHCDSTWLGDRV |
| | ITTSTRTWALPTYNNHLYKQISNGTSGGSTNDNTYFGYSTPWGYFDFNRFHCHFSPRDWQ |
| | RLINNNWGFRPKRLSFKLFNIQVKEVTQNEGTETIANNLTSTIQVFTDSEYQLPYVLGSA |
| | HQGCLPPFPADVFMIPQYGYLTLNNGSQAVGRSSFYCLEYFPSQMLRTGNNFEFSYTFED |
| | VPFHSSCAHSQSSDRLMNPLIDQYLYYLSRTRSTGGTQGTQQLLFSQAGPANMSAQAKNW |
| | LPGPCYRQQRVSTTLSQNNNSNFAWTGATKYHLNGRDSLVNPGVAMATHKDDEERFFPSS |
| | GVLMFGKQGAGRDNVDYSSVMLTSEEEIKTTNPVATEQYGVVADNLQQTNTGPIVGNVNS |
| | QGALPGMVWQNRDVYLQGPIWAKIPHTDGNFHPSPLMGGFGLKHPPPQILIKNTPVPADP |
| | PTTFSQAKLASFITQYSTGQVSVEIEWELQKENSKRWNPEIQYTSNYYKSTNVDFAVNTE |
| | GTYSEPRPIGTRYLTRNL |
| 1357 | MAADGYLPDWLEDNLSEGIREWWDLKPGAPKPKANQQKQDDGRGLVLLGYKYLGPFNGLD |
| | KGEPVNAADAAALEHDKAYDQQLKAGDNPYLRYNHADAEFQERLQEDTSFGGNLGRAVFQ |
| | AKKRVLEPLGLVEEAAKTAPGKKRPVEPSPQRSPDSSTGIGKKGQQPAKKRLNFGQTGDS |
| | ESVPDPQPIGEPPAGPSGLGSGTMAAGGGAPMADNNEGADGVGSSSGNWHCDSTWLGDRV |
| | ITTSTRTWALPTYNNHLYKQISNGTSGGSTNDNTYFGYSTPWGYFDFNRFHCHFSPRDWQ |
| | RLINNNWGFRPKRLSFKLFNIQVKEVTQNEGTKTIANNLTSTIQVFTDSEYQLPYVLGSA |
| | HQGCLPPFPADVFMIPQYGYLTLNNGSQAVGRSSFYCLEYFPSQMLRTGNNFEFSYTFED |
| | VPFHSGYAHSQSLDRLMNPLIDQYLYYLSRTQSTGGTQGTQQLLFSQAGPANMSAQAKNW |
| | LPGPCYRQQRVSTTLSQNNNSNFAWTGATKYHLNGRDSLVNPGVAMATHKDDEERFFPSS |
| | GVLMFGKQGAGRDNVDYSSVMLTSEEEIKTTNPVATEQYGVVADNLQQTNTGPIVGNVNS |
| | QGALPGMVWQNRDVYLQGPIWAKIPHTDGNFHPSPLMGGFGLKHPPPQILIKNTPVPADP |
| | PTTFSQAKLASFITQYSTGQVSVEIEWELQKENSKRWNPEIQYTSNYYKSTNVDFAVNTE |
| | GTYSEPRPIGTRYLTRNL |

TABLE 6
VP2 capsid proteins

| SEQ | |
|---|---|
| ID | |
| NO.: | VP2 Capsid Protein Sequence |
| 1358 | MAPGKKRPVEQSPQEPDSSAGIGKSGAQPAKKRLNFGQTGDTESVPDPQPIGEPPAAPSG |
| | VGSLTMASGGGAPVADNNEGADGVGSSSGNWHCDSQWLGDRVITTSTRTWALPTYNNHLY |
| | KQISNSTSGGSSNDNAYFGYSTPWGYFDFNRFHCHFSPRDWQRLINNNWGFRPKRLNFKL |
| | FNIQVKEVTDNNGVKTIANNLTSTVQVFTDSDYQLPYVLGSAHEGCLPPFPADVFMIPQY |
| | GYLTLNDGSQAVGRSSFYCLEYFPSQMLRTGNNFQFSYEFENVPFHSSYAHSQSLDRLMN |
| | PLIDQYLYYLSKTINGSGQNQQTLKFSVAGPSNMAVQGRNYIPGPSYRQQRVSTTVTQNN |
| | NSEFAWAAASSWALNGRNSLMNPGPAMASHKEGEDRFFPLSGSLIFGKQGTGRDNVDADK |
| | VMITNEEEIKTTNPVATESYGQVATNHQGQSGRGDLGLSAQAAQTGWVQNQGILPGMVWQ |
| | DRDVYLQGPIWAKIPHTDGNFHPSPLMGGFGMKHPPPQILIKNTPVPADPPTAFNKDKLN |
| | SFITQYSTGQVSVEIEWELQKENSKRWNPEIQYTSNYYKSNNVEFAVNTEGVYSEPRPIG |
| | TRYLTRNL |
| 1359 | MAPGKKRPVEQSPQEPDSSAGIGKSGAQPAKKRLNFGQTGDTESVPDPQPIGEPPAAPSGV |
| | GSLTMASGGGAPVADNNEGADGVGSSSGNWHCDSQWLGDRVITTSTRTWALPTYNNHLYK |
| | QISNSTSGGSSNDNAYFGYSTPWGYFDFNRFHCHFSPRDWQRLINNNWGFRPKRLNFKLF |
| | NIQVKEVTDNNGVKTIANNLTSTVQVFTDSDYQLPYVLGSAHEGCLPPFPADVFMIPQYG |
| | YLTLNDGSQAVGRSSFYCLEYFPSQMLRTGNNFQFSYEFENVPFHSSYAHSQSLDRLMNP |
| | LIDQYLYYLSKTINGSGQNQQTLKFSVAGPSNMAVQGRNYIPGPSYRQQRVSTTVTQNNN |
| | SEFAWPGASSWALNGRNSLMNPGPAMASHKEGEDRFFPLSGSLIFGKQGTGRDNVDADKV |
| | MITNEEEIKTTNPVATESYGQVATNHQSGQSGRGDLGLSAQAATGWVQNQGILPGMVWQD |
| | RDVYLQGPIWAKIPHTDGNFHPSPLMGGFGMKHPPPQILIKNTPVPADPPTAFNKDKLNS |
| | FITQYSTGQVSVEIEWELQKENSKRWNPEIQYTSNYYKSNNVEFAVNTEGVYSEPRPIGT |
| | RYLTRNL |
| 1360 | MAPGKKRPVEQSPQEPDSSAGIGKSGAQPAKKRLNFGQTGDTESVPDPQPIGEPPAAPSG |
| | VGSLTMASGGGAPVADNNEGADGVGSSSGNWHCDSQWLGDRVITTSTRTWALPTYNNHLY |
| | KQISNSTSGGSSNDNAYFGYSTPWGYFDFNRFHCHFSPRDWQRLINNNWGFRPKRLNFKL |
| | FNIQVKEVTDNNGVKTIANNLTSTVQVFTDSDYQLPYVLGSAHEGCLPPFPADVFMIPQY |
| | GYLTLNDGSQAVGRSSFYCLEYFPSQMLRTGNNFQFSYEFENVPFHSSYAHSQSLDRLMN |
| | PLIDQYLYYLSKTINGSGQNQQTLKFSVAGPSNMAVQGRNYIPGPSYRQQRVSTTVTQNN |
| | NSEFAWPGASSWALNGRNSLMNPGPAMASHKEGEDRFFPLSGSLIFGKQGTGRDNVDADK |
| | VMITNEEEIKTTNPVATESYGQVATNHQGQSGRGDAVGVAQAAQTGWVQNQGILPGMVWQ |
| | DRDVYLQGPIWAKIPHTDGNFHPSPLMGGFGMKHPPPQILIKNTPVPADPPTAFNKDKLN |
| | SFITQYSTGQVSVEIEWELQKENSKRWNPEIQYTSNYYKSNNVEFAVNTEGVYSEPRPIG |
| | TRYLTRNL |
| 1361 | MAPGKKRPVEQSPQEPDSSAGIGKSGAQPAKKRLNFGQTGDTESVPDPQPIGEPPAAPSGV |
| | GSLTMASGGGAPVADNNEGADGVGSSSGNWHCDSQWLGDRVITTSTRTWALPTYNNHLYK |
| | QISNSTSGGSSNDNAYFGYSTPWGYFDFNRFHCHFSPRDWQRLINNNWGFRPKRLNFKLF |
| | NIQVKEVTDNNGVKTIANNLTSTVQVFTDSDYQLPYVLGSAHEGCLPPFPADVFMIPQYG |
| | YLTLNDGSQAVGRSSFYCLEYFPSQMLRTGNNFQFSYEFENVPFHSSYAHSQSLDRLMNP |
| | LIDQYLYYLSKTINGSGQNQQTLKFSVAGPSNMAVQGRNYIPGPSYRQQRVSTTVTQNNN |
| | SEFAWAAASSWALNGRNSLMNPGPAMASHKEGEDRFFPLSGSLIFGKQGTGRDNVDADKV |
| | MITNEEEIKTTNPVATESYGQVATNHQGQSGRGDAVGVAQAAQTGWVQNQGILPGMVWQD |
| | RDVYLQGPIWAKIPHTDGNFHPSPLMGGFGMKHPPPQILIKNTPVPADPPTAFNKDKLNS |
| | FITQYSTGQVSVEIEWELQKENSKRWNPEIQYTSNYYKSNNVEFAVNTEGVYSEPRPIGT |
| | RYLTRNL |
| 1362 | MAPGKKRPVEQSPQEPDSSAGIGKSGAQPAKKRLNFGQTGDTESVPDPQPIGEPPAAPSG |
| | VGSLTMASGGGAPVADNNEGADGVGSSSGNWHCDSQWLGDRVITTSTRTWALPTYNNHLY |
| | KQISNSTSGGSSNDNAYFGYSTPWGYFDFNRFHCHFSPRDWQRLINNNWGFRPKRLNFKL |
| | FNIQVKEVTDNNGVKTIANNLTSTVQVFTDSDYQLPYVLGSAHEGCLPPFPADVFMIPQY |
| | GYLTLNDGSQAVGRSSFYCLEYFPSQMLRTGNNFQFSYEFENVPFHSSYAHSQSLDRLMN |
| | PLIDQYLYYLSKTINGSGQNQQTLKFSVAGPSNMAVQGRNYIPGPSYRQQRVSTTVTQNN |
| | NSEFAWAAASSWALNGRNSLMNPGPAMASHKEGEDRFFPLSGSLIFGKQGTGRDNVDADK |
| | VMITNEEEIKTTNPVATESYGQVATNHQSGQSGRGDAVGVAQAATGWVQNQGILPGMVWQ |
| | DRDVYLQGPIWAKIPHTDGNFHPSPLMGGFGMKHPPPQILIKNTPVPADPPTAFNKDKLN |
| | SFITQYSTGQVSVEIEWELQKENSKRWNPEIQYTSNYYKSNNVEFAVNTEGVYSEPRPIG |
| | TRYLTRNL |
| 1363 | MAPGKKRPVEQSPQEPDSSAGIGKSGAQPAKKRLNFGQTGDTESVPDPQPIGEPPAAPSG |
| | VGSLTMASGGGAPVADNNEGADGVGNASGNWHCDSQWLGDRVITTSTRTWALPTYNNHLY |
| | KQISSASTGATNDNTYFGYSTPWGYFDFNRFHCHFSPRDWQRLINNNWGFRPKRLNFKLF |
| | NIQVKEVTDNNGVKTIANNLTSTVQVFTDSDYQLPYVLGSAHEGCLPPFPADVFMIPQYG |
| | YLTLNDGSQAVGRSSFYCLEYFPSQMLRTGNNFQFSYEFENVPFHSSYAHSQSLDRLMNP |
| | LIDQYLYYLSKTINGSGQNQQTLKFSVAGPSNMAVQGRNYIPGPSYRQQRVSTTVTQNNN |
| | SEFAWPGASSWALNGRNSLMNPGPAMASHKEGEDRFFPLSGSLIFGKQGTGRDNVDADKV |
| | MITNEEEIKTTNPVATESYGQVATNHQGQSGRGDLGLSAQAAQTGWVQNQGILPGMVWQD |
| | RDVYLQGPIWAKIPHTDGNFHPSPLMGGFGMKHPPPQILIKNTPVPADPPTAFNKDKLNS |
| | FITQYSTGQVSVEIEWELQKENSKRWNPEIQYTSNYYKSNNVEFAVNTEGVYSEPRPIGT |
| | RYLTRNL |
| 1364 | MAPGKKRPVEPSPQRSPDSSTGIGKTGQQPAKKRLNFGQTGDTESVPDPQPIGEPPAAPA |
| | AVGPTTMASGGGAPMADNNEGADGVGNASGNWHCDSTWLGDRVITTSTRTWALPTYNNHL |
| | YKQISNGTSGGATNDNTYFGYSTPWGYFDFNRFHCHFSPRDWQRLINNNWGFRPKRLNFK |
| | LFNIQVKEVTDNNGVKTIANNLTSTVQVFTDSDYQLPYVLGSAHEGCLPPFPADVFMIPQ |
| | YGYLTLNDGSQAVGRSSFYCLEYFPSQMLRTGNNFQFSYEFENVPFHSSYAHSQSLDRLM |
| | NPLIDQYLYYLSKTINGSGQNQQTLKFSVAGPSNMAVQGRNYIPGPSYRQQRVSTTVTQN |
| | NNSEFAWPGASSWALNGRNSLMNPGPAMASHKEGEDRFFPLSGSLIFGKQGTGRDNVDAD |
| | KVMITNEEEIKTTNPVATESYGQVATNHQGQSGRGDLGLSAQAAQTGWVQNQGILPGMVW |
| | QDRDVYLQGPIWAKIPHTDGNFHPSPLMGGFGMKHPPPQILIKNTPVPADPPTAFNKDKL |
| | NSFITQYSTGQVSVEIEWELQKENSKRWNPEIQYTSNYYKSNNVEFAVNTEGVYSEPRPI |
| | GTRYLTRNL |
| 1365 | MAPGKKRPVEQSPQEPDSSSGIVKTGQQPAKKRLNFGQTGDTESVPDPQPLGEPPATPSG |
| | VGSLTMASGGGAPMADNNEGADGVGNASGNWHCDSTWLGDRVITTSTRTWALPTYNNHLY |
| | KQISNGTSGGATNDNAYFGYSTPWGYFDFNRFHCHFSPRDWQRLINNNWGFRPKRLNFKL |
| | FNIQVKEVTDNNGVKTIANNLTSTVQVFTDSDYQLPYVLGSAHEGCLPPFPADVFMIPQY |
| | GYLTLNDGSQAVGRSSFYCLEYFPSQMLRTGNNFQFSYEFENVPFHSSYAHSQSLDRLMN |
| | PLIDQYLYYLSKTINGSGQNQQTLKFSVAGPSNMAVQGRNYIPGPSYRQQRVSTTVTQNN |
| | NSEFAWPGASSWALNGRNSLMNPGPAMASHKEGEDRFFPLSGSLIFGKQGTGRDNVDADK |
| | VMITNEEEIKTTNPVATESYGQVATNHQGQSGRGDLGLSAQAAQTGWVQNQGILPGMVWQ |
| | DRDVYLQGPIWAKIPHTDGNFHPSPLMGGFGMKHPPPQILIKNTPVPADPPTAFNKDKLN |
| | SFITQYSTGQVSVEIEWELQKENSKRWNPEIQYTSNYYKSNNVEFAVNTEGVYSEPRPIG |
| | TRYLTRNL |
| 1366 | MAPGKKRPVEQSPQEPDSSSGIGKTGQQPAKKRLNFGQTGDSESVPDPQPLGEPPATPAA |
| | VGPTTMASGGGAPVADNNEGADGVGSSSGNWHCDSQWLGDRVITTSTRTWALPTYNNHLY |
| | KQISNSTSGGSSNDNAYFGYSTPWGYFDFNRFHCHFSPRDWQRLINNNWGFRPKRLNFKL |
| | FNIQVKEVTDNNGVKTIANNLTSTVQVFTDSDYQLPYVLGSAHEGCLPPFPADVFMIPQY |
| | GYLTLNDGSQAVGRSSFYCLEYFPSQMLRTGNNFQFSYEFENVPFHSSYAHSQSLDRLMN |
| | PLIDQYLYYLSKTINGSGQNQQTLKFSVAGPSNMAVQGRNYIPGPSYRQQRVSTTVTQNN |
| | NSEFAWPGASSWALNGRNSLMNPGPAMASHKEGEDRFFPLSGSLIFGKQGTGRDNVDADK |
| | VMITNEEEIKTTNPVATESYGQVATNHQGQSGRGDLGLSAQAAQTGWVQNQGILPGMVWQ |
| | DRDVYLQGPIWAKIPHTDGNFHPSPLMGGFGLKHPPPQILIKNTPVPADPPAEFSATKFA |
| | SFITQYSTGQVSVEIEWELQKENSKRWNPEVQYTSNYAKSANVDFTVDNNGLYTEPRPIG |
| | TRYLTRPL |
| 1367 | MAPGKKRPVEPSPQRSPDSSTGIGKTGQQPAKKRLNFGQTGDS |
| | ESVPDPQPIGEPPAGPSGLGSGTMAAGGGAPMADNNEGADGVGSSSGNWHCDSAWLGDRV |
| | ITTSTRPWALPTYNNHLYKQISNGTSGGSTNDNTYFGYSTPWGYFDFNRFHCHFSPRDWQ |
| | RLINNNWGFRPKRLNFKLFNIQVKEVTQNEGTKTIANNLTSTIQVFTDSEYQLPYVLGSA |
| | HQGCPPPFPADVFMIPQYGYLTLNNGSQAVGRSSFYCLEYFPSQMRRTGNNFEFSYQFED |
| | VPFHSSYAHSQSLDRLMNPLIDQYLYYLSRTQSTGGTAGTQQLLFSQAGPNNMSAQAKNW |
| | LPGPCYRQQRVSTTLSQNNNSNFAWTGATKYHLNGRDSLVNPGVAMATHKDDEERFFPSS |
| | GVLMFGKQGAGKDNVDYSSVMLTSEEEIKTTNPVATEQYGVVADNLQQQNAAPIVGAVNS |
| | QGALPGMVWQNRDVYLQGPIWAKIPHTDGNFHPSPLMGGFGLKHPPPQILIKNTPVPADP |
| | PTTFSQAKLASFITQYSTGQVSVEIEWELQKENSKRWNPEIQYTSNYYKSTNVDFAVNTE |
| | GTYSEPRPIGTRYLTRNL |
| 1368 | MAPGKKRPVEPSPQRSPDSSTGIGKTGQQPAKKRLNFGQTGDS |
| | ESVPDPQPIGEPPAGPSGLGSGTMAAGGGAPMADNNEGADGVGSSSGNWHCDSAWLGDRV |
| | ITTSTRPWALPTYNNHLYKQISNGTSGGSTNDNTYFGYSTPWGYFDFNRFHCHFSPRDWQ |
| | RLINNNWGFRPKRLNFKLFNIQVKEVTQNEGTKTIANNLTSTIQVFTDSEYQLPYVLGSA |
| | HQGCPPPFPADVFMIPQYGYLTLNNGSQAVGRSSFYCLEYFPSQMRRTGNNFEFSYQFED |
| | VPFHSSYAHSQSLDRLMNPLIDQYLYYLSRTQSTGGTAGTQQLLFSQAGPNNMSAQAKNW |
| | LPGPCYRQQRVSTTLSQNNNSNFAWTGATKYHLNGRDSLVNPGVAMATHKDDEERFFPSS |
| | GVLMFGKQGAGKDNVDYSSVMLTSEEEIKTTNPVATEQYGVVADNLQQQNAAPIVGAVNS |
| | QGALPGMVWQNRDVYLQGPIWAKIPHTDGNFHPSPLMGGFGLKHPPPQILIKNTPVPADP |
| | PTTFSQAKLASFITQYSTGQVSVEIEWELQKENSKRWNPEIQYTSNYYKSTNVDFAVNTE |
| | GTYSEPRPIGTRYLTRNL |
| 1369 | MAPGKKRPVEPSPQRSPDSSTGIGKKGQQPAKKRLNFGQTGDS |
| | ESVPDPQPIGEPPAGPSGLGSGTMAAGGGAPMADNNEGADGVGSSSGNWHCDSTWLGDRV |
| | ITTSTRTWALPTYNNHLYKQISNGTSGGSTNDNTYFGYSTPWGYFDFNRFHCHFSPRDWQ |
| | RLINNNWGFRPKRLSFKLFNIQVKEVTQNEGTKTIANNLTSTIQVFTDSEYQLPYVLGSA |
| | HQGCLPPFPADVFMIPQYGYLTLNNGSQAVGRSSFYCLEYFPSQMLRTGNNFEFSYTFED |
| | VPFHSSYAHSQSLDRLMNPLIDQYLYYLSRTQSTGGTQGTQQLLFSQAGPANMSAQAKNW |
| | LPGPCYRQQRVSTTLSQSNNSNFAWTGATKYHLNGRDSLVNPGVAMATHKDDEERFFPSS |
| | GVLMFGKQGAGRDNVDYSSVMLTSEEEIKTTNPVATEQYGVVADNLQQTNTGPIVGNVNS |
| | QGALPGMVWQNRDVYLQGPIWAKIPHTDGNFHPSPLMGGLGLKHPPPQILIKNTPVPADP |
| | PTTFSQAKLASFITQYSTGQVSVEIEWELQKENSKRWNPEIQYTSNYYKSTNVDFAVNTE |
| | GTYSEPRPIGTRYLTRNL |
| 1370 | MAPGKKRPVEPSPQRSPDSSTGIGKKGQRPAKKRLNFGQTGDS |
| | ESVPDPQPIGEPPAGPSGLGSGTMAAGGGAPMADNNEGADGVGSSSGNWHCDSTWLGDRV |
| | ITTSTRTWALPTYNNHLYKQISNGTSGGSTNDNTYFGYSTPWGYFDFNRFHCHFSPRDWQ |
| | RLINNNWGFRPKRLSFKPFNIQVKEVTQNEGTKTIANNLTSTIQVFTDSEYQLPYVLGSA |
| | HQGCLPPFPADVFMIPQYGYLTLNNGSQAVGRSSFYCLEYFPSQMLRTGNNFEFSYTFED |
| | VPFHSSYAHSQSLDRLMNPLIDQYLHYLSRTQSTGGTQGTQQLLFSQAGPANMSAQAKNW |
| | LPGPCYRQQRVSTTLSQNNNSNFAWTGATKYHLNGRDSLVNPGVAMATHKDDEERFFPSS |
| | GVLMFGKQGAGRDNVDYSSVMLTSEEEIKTTNPVATEQYGVVADNLQQTNTGPIVGNVNS |
| | QGALPGMVWQNRDVYLQGPIWAKIPHTDGNFHPSPLMGGFGLKHPPPQILIKNTPVPADP |
| | PTTFSQAKLASFITQYSTGQVSVEIEWELQKENSKRWNPEIQYTSNYYKSTNVDFAVNTE |
| | GTYSEPRPIGTRYLTRNL |
| 1371 | MAPGKKRPVEPSPQRSPDSSTGIGKKGQQPAKKRLSFGQTGDS |
| | ESVPDPQPIGEPPAGPSGLGSGTMAAGGGAPMADNNEGADGVGSSSGNWHCDSTWLGDRV |
| | ITTSTRTWALPTYNNHLYKQISNGTSGGSTNDNTYFGYSTPWGYFDFNRFHCHFSPRDWQ |
| | RLINNNWGFRPKRLSFKLFNIQVKEVTQNEGTKTIANNLTSTIQVFTDSEYQLPYVLGSA |
| | HQGCLPPFPADVFMIPQYGYLTLNNGSQAVGRSSFYCLEYFPSQMLRTGNNSEFSYTFED |
| | VPFHSSYAHSQSLDRLMNPLIDQYLYYLSRTQSTGGTQGTQQLLFSQAGPANMSAQAKNW |
| | LPGPCYRQQRVSTTLSQNNNSNFAWTGATKYHLNGRDSLVNPGVAMATHKDDEERFFPSS |
| | GVLMFGKQGAGRDNVDYSSVMLTSEEEIKTTNPVATEQYGVVADNLQQTNTGPIVGNVNS |
| | QGALPGMVWQNRDVYLQGPIWAKIPHTDGNFHPSPLMGGFGLKHPPPQILIKNTPVPADP |
| | PTTFSQAKLASFITQYSTGQVSVEIEWELQKENSKRWNPEIQYTSNYYKSTNVDFAVNTE |
| | GTYSEPRPIGTRYLTRNL |
| 1372 | MAPGKKRPVEPSPQRSPDSSTGIGKKGQQPAKKRLNFGQTGDS |
| | ESVPDPQPIGEPPAGPSGLGSGTMAAGGGAPMADNNEGADGVGSSSGNWHCDSTWLGDRV |
| | ITTSTRTWALPTYNNHLYKQISNGTSGGSTNDNTYFGYSTPWGYFDFNRFHCHFSPRDWQ |
| | RLINNNWGFRPKRLSFKLFNIQVKEVTQNEGTKTIANNLTSTIQVFTDSEYQLPYVLGSA |
| | HQGCLPPFPADVFMIPQYGYLTLNNGSQAVGRSSFYCLEYFPSQMLRTGNNFEFSYTFED |
| | VPFHSSYAHSQSLDRLMNPLIDQYLYYLSRTQSTGGTQGTQQLLFSQAGPANMSAQAKNW |
| | LPGPCYRQQRVSTTLSQNNNSNFAWTGATKYHLNGRDSLVNPGVAMATHKDDEERFFPSS |
| | GVLMFGKQGAGRDNVDYSSVMLTSEEEIKTTNPVATEQYGVVADNLQQTNTGPIVGNVNS |
| | QGALPGMVWQNRDVYLQGPIWAKIPHTDGNFHPSPLMGGFGLKHPPPQILIKNTPVPADP |
| | PTTFSQAKLASFITQYSTGQVSVEIEWELQKENSKRWNPEIQYTSNYYKSTNVDFAVNTE |
| | GTYSEPRPIGTRYLTRNL |
| 1373 | MAPGKKRPVEPSPQRSPDSSTGIGKKGQQPAKKRLNFGQTGDS |
| | ESVPDPQPIGEPPAGPSGLGSGTMAAGGGAPMADNNEGADGVGSSSGNWHCDSTWLGDRV |
| | ITTSTRTWALPTYNNHLYKQISNGTSGGSTNDNTYFGYSTPWGYFDFNRFHCHFSPRDWQ |
| | RLINNNWGFRPKRLSFKLFNIQVKEVTQNEGTKTIANNLTSTIQVFTDSEYQLPYVLGSA |
| | HQGCLPPFPADVFMIPQYGYLTLNNGSQAVGRSSFYCLEYFPSQMLRTGNNFEFSYTFED |
| | VPFHSSYAHSQSLDRLMNPLIDQYLYYLSRTQSTGGTQGTQQLLFSQAGPANMSAQAKNW |
| | LPGPCYRQQRVSTTLSQNNNSNFAWTGATKYHLNGRDSLVNPGVAMATHKDDEERFFPSS |
| | GVLMFGKQGAGRDNVDYSSVMLTSEEEIKTTNPVATEQYGVVADNLQQTNTGPIVGNVNS |
| | QGALPGMVWQNRDVYLQGPIWAKIPHTDGNFHPSPLMGGFGLKHPPPQILIKNTPVPADP |
| | PTTFSQAKLASFITQYSTGQVSVEIEWELQKENSKRWNPEIQYTSNYYKSTNVDFAVNTE |
| | GTYSEPRPIGTRYLTRNL |
| 1374 | MAPGKKRPVEPSPQRSPDSSTGIGKKGQQPAKKRLNFGQTGDS |
| | ESVPDPQPIGEPPAGPSGLGSGTMAAGGGAPMADNNEGADGVGSSSGNWHCDSTWLGDRV |
| | ITTSTRTWALPTYNNHLYKQISNGTSGGSTNDNTYFGYSTPWGYFDFNRFHCHFSPRDWQ |
| | RLINNNWGFRPKRLSFKLFNIQVKEVTQNEGTKTIANNLTSTIQVFTDSEYQLPYVLGSA |
| | HQGCLPPFPADVFMIPQYGYLTLNNGSQAVGRSSFYCLEYFPSQMLRTGNNFEFSYTFED |
| | VPFHSSYAHSQSLDRLMNPLIDQYLYYLSRTQSTGGTQGTQQLLFSQAGPANMSAQAKNW |
| | LPGPCYRQQRVSTTLSQNNNSNFAWTGATKYHLNGRDSLVNPGVAMATHKDDEERFFPSS |
| | GVLMFGKQGAGRDNVDYSSVMLTSEEEIKTTNPVATEQYGVVADNLQQTNTGPIVGNVNS |
| | QGALPGMVWQNRDVYLQGPIWAKIPHTDGNFHPSPLMGGFGLKHPPPQILIKNTPVPADP |
| | PTTFSQAKLASFITQYSTGQVSVEIEWELQKENSKRWNPEIQYTSNYYKSTNVDFAVNTE |
| | GTYSEPRPIGTRYLTRNL |
| 1375 | MAPGKKRPVEPPPQRSPDSSTGIGKKGQQPAKKRLNFGQTGDS |
| | ESVPDPQPIGEPPAGPSGLGSGTMAAGGGAPMADNNEGADGVGSSSGNWHCDSTWLGDRV |
| | ITTSTRTWALPTYNNHLYKQISNGTSGGSTNDNTYFGYSTPWGYFDFNRFHCHFSPRDWQ |
| | RLINNNWGFRPKRLSFKLFNIQVKEVTQNEGTKTVANNLTSTIQVFTDSEYQLPYVLGSA |
| | HQGCLPPFPADVFMIPQYGYLTLNNGSQAVGRSSFYCLEYFPSQMLRTGNNFEFSYTFED |
| | VPFHSSYAHSQSLDRLMNPLIDQYLYYLSRTQSTGGTQGTQQLLFSQAGPANMSAQAKNW |
| | LPGPCYRQQRVSTTLSQNNNSNFAWTGATKYHLNGRDSLVNPGVAMATHKDDEERFFPSS |
| | GVLMFGKQGAGRDNVDYSSVMLTSEEEIKTTNPVATEQYGVVADNLQQTNTGPIVGNVNS |
| | QGALPGMVWQNRDVYLQGPIWAKIPHTDGNFHPSPLMGGFGLKHPPPQILIKNTPVPADP |
| | PTTFSQAKLASFITQYSTGQVSVEIEWELQKENSKRWNPEIQYTSNYYKSTNVDFAVNTE |
| | GTYSEPRPIGTRYLTRNL |
| 1376 | MAPGKKRPVEPSPQRSPDSSTGIGKKGQQPAKKRLNFGQTGDS |
| | ESVPDPQPIGEPPAGPSGLGSGTMAAGGGAPMADNNEGADGVGSSSGNWHCDSTWLGDRV |
| | ITTSTRTWALPTYNNHLYKQISNGTSGGSTNDNTYFGYSTPWGYFDFNRFHCHFSPRDWQ |
| | RLINNNWGFRPKRLSFKLFNIQVKEVTQDEGTKTIANNLTSTIQVFTDSEYQLPYVLGSA |
| | HQGCLPPFPADVFMIPQYGYLTLNNGSQAVGRSSFYCLEYFPSQMLRTGNNFEFSYTFED |
| | VPFHSSYAHSQSLDRLMNPLIDQYLYYLSRTQSTGGTQGTQQLLFSQAGPANMSARAKNW |
| | LPGPCYRQQRVSTTLSQNNNSNFAWTGATKYHLNGRDSLVNPGVAMATHKDDEERFFPSS |
| | GVLMFGKQGAGRDNVDYSSVMLTSEEEIKTTNPVATEQYGVVADNLQQANTGPIVGNVNS |
| | QGALPGMVWQNRDVYLQGPIWAKIPHTDGNFHPSPLMGGFGLKHPPPQILIKNTPVPADP |
| | PTTFSQAKLASFITQYSTGQVSVEIEWELQKENSKRWNPEIQYTSNYYKSTNVDFAVNSE |
| | GTYSEPRPIGTRYLTRNL |
| 1377 | MAPGKKRPVEPDSSSGIGKSGQQPAKKRLNFGQTGDSESVPDP |
| | QPLSEPPAGPSGLGSGTMAAGGGAPMADNNEGADGVGNVSGNWHCDSTWLGDRVITTSTR |
| | TWALPTYNNHLYKQISNGTSGGSSNDNTYFGYSTPWGYFDFNRFHCHFSPRDWQRLINNN |
| | WGFRPKKLNFKLFNIQVKEVTQNEGTKTIANNLTSTVQVFTDSEYQLPYVLGSAHQGCLP |
| | PFPADVFMIPQYGYLTLNNGSQAVGRSSFYCLEYFPSQMLRTGNNFTFSYTFEDVPFHSS |
| | YAHSQSLDRLMNPLIDQYLYYLSRTQTNGTNATQTLLFAQAGPQNMSAQAKNWLPGPCYR |
| | QQRVSTTVSQNNNSNFTWTGATKYHLNGRDSLVSPGVAMATHKDDEERFFPSSGVLMFGK |
| | QGAGKDNVEYTNVMLTSEEEIKTTNPVATEQYGVVADNLQQTNSAPIVGAVNSQGALPGM |
| | VWQNRDVYLQGPIWAKIPHTDGNFHPSPLMGGFGLKHPPPQILIKNTPVPADPPVNFTDA |
| | KLASFITQYSTGQVSVEIEWELQKENSKRWNPEIQYTSNYYKSANVDFAVNADGVYSEPR |
| | PIGTRYLTRNL |
| 1378 | MAPGKKRPVEPDSSSGIGKSGQQPAKKRLNFGPTGDSESVPDP |
| | QPLSEPPAGPSGLGSGTMAAGGGAPMADNNEGADGVGNVSGNWHCDSTWLGDRVITTSTR |
| | TWALPTYNNHLYKQISNGTSGGSSNDNTYFGYSTPWGYFDFNRFHCHFSPRDWQRLINNN |
| | WGFRPKKLNFKLFNIQVKEVTQNEGTKTTANNLTSTVQVFTDSEYQLPYVLGSAHQGCLP |
| | PFPADVFMIPQYGYLTLNNGSQAVGRSSFYCLEYFPSQMLRTGNNFTFSYTFEDVPFHSS |
| | YAHSQSLDRLMNPLIDQYLYYLSRTQTNGTNATQTLLFAQAGPQNMSAQAKNWLPGPCYR |
| | QQRVSTAVSQNNNSNFTWTGATKYHLNGRDSLVNPGVAMATHKDDEERFFPSSGVLMFGK |
| | QGAGKDNVEYTNVMLTSEEEIKTTNPVATEQYGVVADNLQQTNSAPIVGAVNSQGALPGM |
| | VWQNRDVYLQGPIWAKIPHTDGNFHPSPLMGGFGLKHPPPQILIKNTPVPADPPVNFTDA |
| | KLASFITQYSTGQVSVEIEWELQKENSKRWNPEIQYTSNYYKSANVDFAVNADGVYSEPR |
| | PIGTRYLTRNL |
| 1379 | MAPGKKRPVEPDSSSGIGKSGRQPAKKRLNFGQTGDSESVPDP |
| | QPLSEPPAGPSGLGSGTMAAGGGAPMADNNEGADGVGNASGNWHCDSTWLGDRVITTSTR |
| | TWALPTYNNHLYKQISNGTSGGSSNDNTYFGYSTPWGYFDFNRFHCHFSPRDWQRLINNN |
| | WGFRPKRLNFKLFNIQVKEVTQNEGTKTIANNLTSTVQVFTDSKYQLPYVLGSAHQGCLP |
| | PFPADVFMIPQYGYLTLNNGSQAVGRSSFYCLEYFPSQMLRTGNNFTFSYTFEDVPFHSS |
| | YAHSQSLDRLMNPLIDQYLYYLSRTQTNGTNATQTLLFAQAGPQNMSAQAKNWLPGPCYR |
| | QQRVSTTVSQNNNSNFTWTGATKYHLNGRDSLVNPGVAMATHKDDEERFFPSSGVLMFGK |
| | QGAGKDNVEYTNVMLTSEEEIKTTNPVATEQYGVVADNLQQTNSAPIVGAVNSQGALPGM |
| | VWQNRDVYLQGPIWAKIPHTDGNFHPSPLMGGFGLKHPPPQILIKNTPVPADPPVNFTDA |
| | KLASFITQYSTGQVSVEIEWELQKENSKRWNPEIQYTSNYYKSANVDFAVNADGVYSEPR |
| | PIGTRYLTRNL |
| 1380 | MAPGKKRPVEPSPQRSPDSSTGIGKKGQQPARKRLNFGQTGDS |
| | ESVPDPQPIGEPPAAPSSVGSGTMAAGGGAPMADNNEGADGVGSSSGNWHCDSTWLGDRV |
| | ITTSTRTWALPTYNNHLYKQISNGTSGGSTNDNTYFGYSTPWGYFDFNRFHCHFSPRDWQ |
| | RLINNNWGFRPKRLSFKLFNIQVKEVTQNEGTKTIANSLTSTIQVFTDSEYQLPYVLGSA |
| | HQGCLPPFPADVFMIPQYGYLTPNNGSQAVGRSSFYCLEYFPSQMLRTGNNFSFSYTFED |
| | VPFHSSYAHSQSLDRLMNPLIDQYLYYLSRTQSTGGTAGTQQLLSSQAGPSNMSAQARNW |
| | LPGPCYRQQRVSTTLSQNNNSNFAWTGATKYHLNGRDSLVNPGVAMATNKDDEDRFFPSS |
| | GILMFGKQGAGKDNVDYSNVMLTSEEEIKTTNPVATEQYGVVADNLQQQNTAPIVGAVNS |
| | QGALPGMVWQNRDVYLQGPIWAKIPHTDGNFHPSPLMGGFGLKHPPPQILIKNTPVPADP |
| | PTAFNQAKLNSFITQYSTGQVSVEIEWELQKENSKRWNPEIQYTSNYYKSTNVDFAVNTE |
| | GVYSEPRPIGTRYLTRNL |
| 1381 | MAPGKKRPVEPSPQRSPDSSTGIGKKGQQPARKRLNFGQTGDS |
| | ESVPDPQPIGEPPAAPSSVGSGTMAAGGGAPMADNNEGADGVGSSSGNWHCDSTWLGDRV |
| | ITTSTRTWALPTYNNHLYKQISNGTSGGSTNDNTYFGYSTPWGYFDFNRFHCHFSPRDWQ |
| | RLINNNWGFRPKRLSFKLFNIQVKEVTQNEGTKTIANNLTSTIQVFTDSEYQLPYVLGSA |
| | HQGCLPPFPADVFMIPQYGYLTLNNGSQAVGRSSFYCLEYFPSQMLRTGNNFSFSYTFED |
| | VPFHSSYVHSQSLDRLMNPLIDQYLYYLSRTQSTGGTAGTQQLLFSQAGPSNMSAQARNW |
| | LPGPCYRQQRVSTTLSQNNNSNFAWTGATKYHLNGRDSLVNSGVAMATNKDDEDRFFPSS |
| | GILMFGKQGAGKDNVDYSNVMLTSEEEIKTTNPVATEQYGVVADNLQQQNTAPIVGAVNS |
| | QGALPGMVWQNRDVYLQGPIWAKIPHTDGNFHPSPLMGGFGLKHPPPQILIKNTPVPADP |
| | PTAFNQAKLNSFITQYSTGQVSVEIEWELQKENSKRWNPEIQYTSNYYKSTNVDFAVNTE |
| | GVYSEPRPIGTRYPTRNL |
| 1382 | MAPGKKRPVEPSPQRSPDSSTGIGKKGQQPARKRLNFGQTGDS |
| | ESVPDPQPIGEPPAAPSSVGSGTMAAGGGAPMADNNEGADGVGSSSGNWHCDSTWLGDRV |
| | ITTSTRTWALPAYNNHLYKQISNGTSGGSTNDNTYFGYSTPWGYFDFNRFHCHFSPRDWQ |
| | RLINNNWGFRPKRLSFKLFNIQVKEVTQNEGTKTIANNLTSTIQVFTDSEYQLPYVLGSA |
| | HQGCLPPFPADVFMIPQYGYLTLNNGSQAVGRSSFYCLEYFPSQMLRTGNNFSFSYTFED |
| | VPFHSSYAHSQSLDRLMNPLIDQYLYYLSRTQSTGGTAGTQQLLFSQAGPSNMSAQARNW |
| | LPGPCYRQQRVSTTLSQNNNSNFAWTGATKYHLSGRDSLVNPGVAMATNKDDEDRFFPSS |
| | GILMFGKQGAGKDNVDYSNVMLTSEEEIKTTNPVATEQYGVVADNLQQQNTAPIVGAVNS |
| | QGALPGMVWQNRDVYLQGPIWAKIPHTDGNFHPSPLMGGFGLKHPPPQILIKNTPVPADP |
| | PTAFNQAKLNSSITQYSTGQVSVEIEWELQKENSKRWNPEIQYTSNYYKSTNVDFAVNTE |
| | GVYSEPRPIGTRYLTRNL |
| 1383 | MAPGKKRPVEPSPQRSPDSSTGIGKKGQQPARKRLNFGQTGDS |
| | ESVPDPQPIGEPPAAPSSVGSGTMAAGGGAPMADNNEGADGVGSSSGNWHCDSTWLGDRV |
| | ITTSTRTWALPTYNNHLYKQISNGTSGGSTNDNTYFGYSTPWGYFDFNRFHCHFSPRDWQ |
| | RLINNNWGFRPKRLSFKLFNIQVKEVTQNEGTKTIANNLTSTIQVFTDSEYQLPYVLGSA |
| | HQGCLPPFPADVFMIPQYGYLTLNNGSQAVGRSSFYCLEYFPSQMLRTGNNFSFSYTFED |
| | VPFHSSYAHSQSLDRLMNPLIDQYLYYLSRTQSTGGTAGTQQLLFSQAGPSNMSAQARNW |
| | LPGPCYRQQRVSTTLSQNNNSNFAWTGATKYHLNGRDSLVNPGVAMATNKDDEDRFFPSS |
| | GILMFGKQGAGKDNVDYSNVMLTSEEEIKTTNPVATEQYGVVADNLQQQNTAPIVGAVNS |
| | QGALPGMVWQNRDVYLQGPIWAKIPHTDGNFHPSPLMGGFGLKHPPPQILIKNTPVPADP |
| | PTAFNQAKLNSFITQYSTGQVSVEIVWELQKENSKRRNPEIQYTSNYYKSTNVDFAVNTE |
| | GVYSEPRPIGTRYLTRNL |
| 1384 | MAPGKKRPVEPSPQRSPDSSTGIGKKGQQPARKRLNFGQTGDS |
| | ESVPDPQPIGEPPAAPSSVGSGTMAAGGGAPMADNNEGADGVGSSSGNWHCDSTWLGDRV |
| | ITTSTRTWALPTYNNHLYKQISNGTSGGSTNDNTYFGYSTPWGYFDFNRFHCHFSPRDWQ |
| | RLINNNWGFRPKRLSFKLFNIQVKEVTQNEGTKTIANNLTSTIQVFTDSEYQLPYVLGSA |
| | HQGCLPPFPADVFMIPQYGYLTLNNGSQAVGRSSFYCLEYFPSQMLRTGNNFSFSYTFED |
| | VPFHSSYAHSQSLDRLMNPLIDQYLYYLSRTQSTGGTAGTQQLLFSQAGPSNMSAQARNW |
| | LPGPCYRQQRVSTTLSQNNNSNFAWTGATKYHLNGRDSLVNPGVAMATNKDDEDRFFPPS |
| | GILMFGKQGAGKDNVDYSNVMLTSEEEIKTTNPVATEQYGVVADNLQQQNTAPIVGAVNS |
| | QGALPGMVWQNRDVYLQGPIWAKIPHTDGNFHPSPLMGGFGLKHPPPQILIKNTPVPADP |
| | PTAFNQAKLNSFITQYSTGQVSVVIEWELQKENSKRWNPEIQYTSNYYKSTNVDFAVNTE |
| | GVYSELRPIGTRYLTRNL |
| 1385 | MAPGKKRPVEPSPQRSPDSSTGIGKKGQQPARKRLNFGQTGDS |
| | ESVPDPQPIGEPPAAPSSVGSGTMAAGGGAPMADNNEGADGVGSSSGNWHCDSTWLGDRV |
| | ITTSTRTWALPTYNNHLYKQISNGTSGGSTNDNTYFGYSTPWGYFDFNRFHCHFSPRDWQ |
| | RLINNNWGFRPKRLSFKLFNIQVKEVTQNEGTKTIANNLTSTIQVFTDSEYQLPYVLGSA |
| | HQGCLPPFPADVFMIPQYGYLTLNNGSQAVGRSSFYCLEYFPSQMLRTGNNFSFSYTFED |
| | VPFHSSYAHSQSLDRLMNPLIDQYLYYLSRTQSTGGTAGTQQLLFSQAGPSNMSAQARNW |
| | LPGPCYRQQRVSTTLSQNNNSNFAWTGATKYHLNGRDSLVNPGVAMATNKDDEDRFFPSS |
| | GILMFGKQGAGKDNVDYSNVMLTSEEEIKATNPVATEQYGVVADNLQQQNTAPIVGAVNS |
| | QGALPGMVWQNRDVYLQGPIWAKIPHTDGNFHPSPLMGGFGLKHPPPQILIKNTPVPADP |
| | PTAFNQAKLNSFITQYSTGQVSVEIEWELQKENSKRWNPEIQYTSNYYKSTNVDFAVNTE |
| | GVYSEPRPIGTRYLTRNL |
| 1386 | MAPGKKRPVEPSPQRSPDSSTGIGKKGQQPARKRLNFGRTGDS |
| | ESVPDPQPIGEPPAAPSSVGSGTMAAGGGAPMADNNEGADGVGSSSGNWHCDSTWLGDRV |
| | ITTSTRTWALPTYNNHLYKQISNGTSGGSTNDNTYFGYSTPWGYLDFNRFHCHFSPRDWQ |
| | RLINNNWGFRPKRLSFKLFNIQVKEVTQNEGTKTIANNLASTIQVFTDSEYQPPYVLGSA |
| | HQGCLPPFPADVFMIPQYGYLTLNNGSQAVGRSSFYCLEYFPSQMLRTGNNFSFSYTFED |
| | VPFHSSYAHSQSLDRLMNPLIDQYLYYLSRTQSTGGTAGTQQLLFSRAGPSNMSAQARNW |
| | LPGPCYRQQRVSTTLSQNNNSNFAWTGATKYHLNGRDSLVNPGVAMATNKDDEDRFFPSS |
| | GILMFGKQGAGKDNVDYSNVMLTSEEEIKTTNPVATEQYGVVADNLQQQNTAPTVGAVNS |
| | QGALPGMVWQNRDVYLQGPIWAKIPHTDGNFHPSPLMGGFGLKHPPPQILIKNTPVPADP |
| | PTAFNQAKLNSFIAQYSTGQVSVEIEWELQKENSKRWNPEIQYTSNYYKSTNADFAVNTE |
| | GVYSEPRPIGTRYLTRNL |
| 1387 | MAPGKKRPVEPSPQRSPDSSTGIGKKGQQPARKRLNFGQTGDS |
| | ESVPDPQLIGEPPAAPSSVGSGTMAAGGGAPMADNNEGADGVGSSSGNWHCDSTWLGDRV |
| | ITTSTRTWALPTYNNHLYKQISNGTSGGSTNDNTYFGYSTPWGYFDFNRFHCHFSPRDWQ |
| | RLINNNWGFRPKRLSFKLFNIQVKEVTQNEGTKTIANNLTSTIQVFTDSEYQLPYVLGSA |
| | HQGCLPPFPADVFMIPQYGNLTLNNGSQAVGRSSFYCLEYFPSQMLRTGNNFSFSYTFED |
| | VPFHSSYAHSQSLDRLMNPLIDQYLYYLSRTQSTGGTAGTQQLLFSQAGPSNMSAQARNW |
| | LPGPCYRQQRVSTTLSQNNNSNFAWTGATKYHLNGRDSLVNPGVAMATNKDDEDRFFPSS |
| | GILMFGKQGAGKDNMGYSNVMLTSEEEIKTTNPVATEQYGVVADNLQQQNTAPIVGAVNS |
| | QGALPGMVWQNRDVYLQGPIWAKIPHTDGNFHPSPLMGGFGLKHPPPQILIKNTPVPADP |
| | PTAFNQAKLNSFITQYGTGQVSVEIEWELQKENSKRWNPEIQYTSNYYKSTNVDFAVNTE |
| | GVYSEPRPIGTRYLTRNL |
| 1388 | MAPGKKRPVEPSPQRSPDSSTGIGKKGQQPARKRLNFGQTGDS |
| | ESVPDPQPIGEPPAAPSSVGSGTMAAGGGAPMADNNEGADGVGSSSGNWHCDSTWLGDRV |
| | ITTSTRTWALPTYNNHLYKQISNGTSGGSTNDNTYFGYSTPWGYFDFNRFHCHFSPRDWQ |
| | RLINNNWGFRPKRLSFKLFNIQVKEVTQNEGTKTIANNLTSTIQVFTDSEYQLPYVLGSA |
| | HQGCQPPFPADVFMIPQYGYLTLNNGSQAVGRSSFYCLEYFPSQMLRTGNNFSFSYTFED |
| | VPFHSSYAHSQSLDRLMNPLIDQYLYYLSRTQSTGGTAGTQQLLFSQAGPSNMSAQARNW |
| | LPGPCYRQQRVSTTLSQNNNSNFAWTGATKYHLNGRDSLVNPGVAMATNKDDEDRFFPSS |
| | GILMFGKQGAGKDNVDYSNVMLTSEEEIKTTNPVATEQYGVVADNLQQQNTAPIVGAVNS |
| | QGALPGMVWQNRDVYLQGPIWAKIPHTDGNFHPSPLMGGFGLKHPPPQILIKNTPVPADP |
| | PTAFNQAKLNSFITQYSTGQVSVEIEWEPQKENSKRWNPEIQYTSNYYKSTNVDFAVNTE |
| | GVYSEPRPIGTRYLTRNL |
| 1389 | MAPGKKRPVEPSPQRSPDSSTGIGKKGQQPARKRLNFGQTGDS |
| | ESVPDPQPIGEPPAAPSSVGSGTMAAGGGAPMADNNEGADGVGSSSGNWHCDSTWLGDRV |
| | ITTSTRTWALPTYNNHLYKQTSNGTSGGSTNDNTYFGYSTPWGYFDFNRFHCHFSPRDWQ |
| | RLINNNWGFRPKRLSFKLFNIQVKEVTQNEGTKTIANNLTSTIQVFTDSEYQLPYVLGSA |
| | HQGCLPPFPADVFMIPQYGYLTLNNGSQAVGRSSFYCLEYFPSQMLRTGNNFSFSYTFED |
| | VPFHSSYAHSQSLDRLMNPLIDQYLYYLSRTQSTGGTAGTQQLLFSQAGPSNMSAQARNW |
| | LPGPCYRQQRVSTTLSQNNNSNFAWTGATKYHLNGRDSLVNPGVAMATNKDDEDRFFPSS |
| | GILMFGKQGAGKDNVDYSNVMLTSEEEIKTTNPVATEQYGVVADNLQQQNTAPIVGAVNS |
| | QGALPGMVWQNRDVYLQGPIWAKIPHTDGNFHPSPLMGGFGLKHPPPQILIKNTPVPADP |
| | PTAFNQAKLNSFITQYSTGQVSAEIEWELQKENSKRWNPEIQYTSNYYKSTNVDFAVNTE |
| | GVYSEPRPIGTRYLTRNL |
| 1390 | MAPGKKRPVEPSPQRSPDSSTGIGKKGQQPARKRLNFGQTGDS |
| | ESVPDPQPIGEPPAAPSSVGSGTMAAGGGAPMADNNEGADGVGSSSGNWHCDSTWLGDRV |
| | ITTSTRTWALPTYNNHLYKQISNGTSGGSTNDNTYFGYSTPWGYFDFNRFHCHFSPRDWQ |
| | RLINNNWGFRPKRLSFKLFNIQVKEVTQNEGTKTIANNLTSTIQVFTDSEYQLPYVLGSA |
| | HQGCLPPFPADVFMIPQYGYLTLNNGSQAVGRSSFYCLEYFPSQMLRTGNNFSFSYTFED |
| | VPFHSSYAHSQSLDRLMNPLIDQYLYYLSRTQSTGGTAGTQQLLFSQAGPSNMSAQARNW |
| | LPGPCYRQQRVSTTLSQNNNSNFAWTGATKYHLNGRDSLVNPGVAMATNKDDEDRFFPSS |
| | GILMFGKQGAGKDNVDYSNVMLTSEEEIKTTNPVATEQYGVVADNLQQQNTAPIVGAVNS |
| | QGALPGMVWQNRDVYLQGPIWAKIPHTDGNFHPSPLMGGFGLKHPPPQILIKSTPVPADP |
| | PTAFNQAKLNSFITQYSTGQVSVEIEWELQKENSKCWNPEIQYTSNYYKSTNVDFAVNTE |
| | GVYSEPRPIGTRYLTRNL |
| 1391 | MAPGKKRPVEPSPQRSPDSSTGIGKKGQQPARKRLNFGQTGDS |
| | ESVPDPQPIGEPPAAPSSVGSGTMAAGGGAPMADNNEGADGVGSSSGNWHCDSTWLGDRV |
| | ITTSTRTWALPTYNNHLYKQISNGTSGGSTNDNTYFGYSTPWGYFDFNRFHCHFSPRDWQ |
| | RPINNNWGFRPKRLSFKLFNIQVKEVTQNEGTKTIANNLTSTIQVFTDSEYQLPYVLGSA |
| | HQGCLPPFPADVFMIPQYGYLTLNNGSQAVGRSSFYCLEYFPSQMLRTGNNFSFSYPFED |
| | VPFHSSYAHSQSLDRLMNPLIDQYLYYLSRTQSTGGTAGTQQLLFSQAGPSNMSAQARNW |
| | LPGPCYRQQRVSTTLSQNNNSNFAWTGATKYHLNGRDSLVNPGVAMATNKDDEDRFFPSS |
| | GILMFGKQGAGKDNVDYSNVMLTSEEEIKTTNPVATEQYGVVADNLQQQDTAPIVGAVNS |
| | QGALPGMVWQNRDVYLQGPIWAKIPHTDGNFHPSPLMGGFGLKHPPPQVLIKNTPVPADP |
| | PTAFNQAKLNSFITQYSTGQVSVEIEWELQKENSKRWNPEIQYTSNYYKSTNVDFAVNTE |
| | GVYSEPRPIGTRYLTRNL |
| 1392 | MAPGKKRPVEPSPQRSPDSSTGIGKKGQQPAGKRLNFGQTGDS |
| | ESVPDPQPIGEPPAAPSSVGSGTMAAGGGAPMADNNEGADGVGSSSGNWHCDSTWLGDRV |
| | ITTSTRTWALPTYNNHLYKQISNGTSGGSTNDNTYFGYSTPWGYFDFNRFHCHFSPRDWQ |
| | RLINNNWGFRPKRLSFKLFNIQVKEVTQNEGTKTIANNLTSTIQVFTDSEYQLPYVLGSA |
| | HQGCLPPFPADVFMIPQYGYLTLNNGSQAVGRSSFYCLEYFPSQMLRTGNNFSFSYTFED |
| | VPFHSSYAHSQSLDRLMNPLVDQYLYYLSRTQSTGGTAGTQQLLFSQAGPSNMSAQARNW |
| | LPGPCYRQQRVSTTLSQNNNSNFAWTGATKYHLNGRDSLVNPGVAMATNKDDEDRFFPSS |
| | GILMFGKQGAGKDNVDYSNVMLTSEEEIKTTNPVATEQYGVVADNLQQQNTAPIVGAVNS |
| | QGALPGMVWQNRDVYLQGPIWAKIPHTDGNFHPSPLMGGFGLKHPPPQILIKNTPVPADP |
| | PTAFNQAKLNSFITQYSTGQVSVEIEWELQKENSKRWSPEIQYTSNYYKSTNVDFAVNTE |
| | GVYSEPRPIGTRYLTRNL |
| 1393 | MAPGKKRPVEPSPQRSPDSSTGIGKKGQQPARKRLNFGQTGDS |
| | ESVPDPQPIGEPPAGPSGLGSGTMAAGGGAPMADNNEGADGVGNASGNWHCDSTWLGDRV |
| | ITTSTRTWALPTYNNHLYKQISSQSAGSTNDNVYFGYSTPWGYFDFNRFHCHFSPRDWQR |
| | LINNNWGFRPKKLNFKLFNIQVKEVTTNDGVTTIANNLTSTVQVFSDSEYQLPYVLGSAH |
| | QGCLPPFPADVFMIPQYGYLTLNNGSQAVGRSSFYCLEYFPSQMLRTGNNFSFSYTFEDV |
| | PFHSSYAHSQSLDRLMNPLIDQYLYYLSRTQSTGGTAGTQQLLFSQAGPSNMSTQARNWL |
| | PGPCYRQQRVSTTLSQNNNSNFAWTGATKYHLNGRDSLVNPGVAMATNKDDEDRFFPSSG |
| | ILMFGKQGAGKDNVDYSNVMLTSEEEIKTTNPVATEQYGVVADNLQQQNTAPIVGAVNSQ |
| | GALPGMVWQNRDVYLQGPIWAKIPHTDGNFHPSPLMGGFGLKHPPPQILIKNTPVPADPP |
| | TAFNQAKLNSFITQYSTGQVSVEIEWELQKENSKRWNPEIQYTSNYYKSTNVDFAVNTEG |
| | AYSEPRPIGTRYLTRN |
| 1394 | MAPGKKRPVEPSPQRSPDSSTGIGKKGQQPARKRLNFGQTGDS |
| | ESVPDPQPIGEPPAGPSGLGSGTMAAGGGAPMADNNEGADGVGNASGNWHCDSTWLGDRV |
| | ITTSTRTWALPTYNNHLYKQISSQSAGSTNDNVYFGYSTPWGYFDFNRFHCHFSPRDWQR |
| | LINNNWGFRPKKLNFKLFNIQVKEVTTNDGVTTIANNPTSTVQVFSDSEYQLPYVLGSAH |
| | QGCLPPFPADVFMIPQYGYLTLNNGSQSVGRSSFYCLEYFPSQMLRTGNNFTFSYTFEDV |
| | PFHSSYAHSQSLDRLMNPLIDQYLYYLARTQSNAGGTAGNRELQFYQGGPTTMAEQAKNW |
| | LPGPCYRQQRVSTTLSQNNNSNFAWTGATKYHLNGRDSLVNPGVAMATNKDDEDRFFPSS |
| | GILMFGKQGAGKDNVDYSNVMLTSEEEIKTTNPVATEQYGVVADNLQQQNTAPIVGAVNS |
| | QGALPGMVWQNRDVYLQGPIWAKIPHTDGNFHPSPLMGGFGLKHPPPQILIKNTPVPADP |
| | PTAFNQAKLNSFITQYSTGQVSVEIEWELQKENSKRWNPEIQYTSNYYKSTNVDFAVNTE |
| | GVYSEPRPIGTRYLTRNL |
| 1395 | MAPGKKGPVEPSPQRSPDSSTGIGKKGQQPARKRLNFGQTGDS |
| | ESVPDPQPIGEPPAGPSGLGSGTMAAGGGAPMADNNEGADGVGNASGNWHCDSTWLGDRV |
| | ITTSTRTWALPTYNNHLYKQISSQSAGSTNDNVYFGYSTPWGYFDFNRFHCHFSPRDWQR |
| | LINNNWGFRPKKLNFKLFNIQVKEVTTNDGVTTIANNLTSTVQVFSDSEYQLPYVLGSAH |
| | QGCLPPFPADVFMIPQYGYLTLNNGSQSVGRSSFYCLEYFPSQMLRTGNNFTFSYTFEDV |
| | PFHSSYAHSQSLDRLMNPLIDQYLYYLARTQSNAGGTAGNRELQFYQGGPTTMAEQAKNW |
| | LPGPCFRQQRVSKTLDQNNNSNFAWTGATKYHLNGRNSLVNPGVAMATHKDDEERFFPSS |
| | GVLIFGKTGAANKTTLENVLMTNEEEIRPTNPVATEEYGTVSSNLQAANTAAQTQVVNNQ |
| | GALPGMVWQNRDVYLQGPIWAKIPHTDGNFHPSPLMGGFGLKHPPPQILIKNTPVPANPP |
| | EVFTPAKFASFITQYSTGQVSVEIEWELQKENSKRWNPEIQYTSNFDEQTGVDFAVDSQG |
| | VYSEPRPIGTRYLTRNL |
| 1396 | MAPGKKRPVEPSPQRSPDSSTGIGKKGQQPARKRLNFGQTGDS |
| | ESVPDPQPIGEPPAGPSGLGSGTMAAGGGAPMADNNEGADGVGNASGNWHCDSTWLGDRV |
| | ITTSTRTWALPTYNNHLYKQISSQSAGSTNDNVYFGYSTPWGYFDFNRFHCHFSPRDWQR |
| | LINNNWGFRPKKLNFKLFNIQVKEVTTNDGVTTIANNLTSTVQVFSDSEYQLPYVLGSAH |
| | QGCLPPFPADVFMIPQYGYLTLNNGSQSVGRSSFYCLEYFPSQMLRTGNNFTFSYTFEDV |
| | PFHSSYAHSQSLDRLMNPLIDQYLYYLARTQSNAGGTAGNRELQFYQGGPTTMAEQAKNW |
| | LPRPCFRQQRVSKTLDQNNNSNFAWTGATKYHLNGRNSLVNPGVAMATHKDDEERFFPSS |
| | GVLIFGKTGAANKTTLENVLMTNEEEIRPTNPVATEEYGTVSSNLQAANTAAQTQVVNNQ |
| | GALPGMVWQNRDVYLQGPIWAKIPHTDGNFHPSPLMGGFGLKHPPPQILIKNTPVPANPP |
| | EVFTPAKFASFITQYSTGQVSVEIEWELQKENSKRWNPEIQYTSNFDKQTGVDFAVDSQG |
| | VYSEPRPIGTRYLTRNL |
| 1397 | MAPGKKRPVEPSPQRSPDSSTGIGKKGQQPARKRLNFGQTGDS |
| | ESVPDPQPIGEPPAGPSGLGSGTMAAGGGAPMADNNEGADGVGNASGNWHCDSTWLGDRV |
| | ITTSTRTWALPTYNNHLYKQISSQSAGSTNDNVYFGYSTPWGYFDFNRFHCHFSPRDWQR |
| | LINNNWGFRPKKLNFKLFNIQVKEVTTNDGVTTIANNLTSTVQVFSDSEYQLPYVLGSAH |
| | QGCLPPFPADVFMIPQYGYLTLNNGSQSVGRSSFYCLEYFPSQMLRTGNNFTFSYTFEDV |
| | PFHSSYAHSQSLDRLMNPLIDQYLYYLARTQSNAGGTAGNRELQFYQGGPTTMAEQAKNW |
| | LPGPCFRQQRVSKTLDQNNNSNFAWTGATKYHLNGRNSLVNPGVAMATHKDDEERFFPSS |
| | GVLIFGKTGAANKTTLENVLMTNEEEIRPTNPVATEEYGTVSSNLQAANTAAQTQVVNNQ |
| | GALPGMVWQNRDVYLQGPIWAKIPHTDGNFHPSPLMGGFGLKHPPPQILIKNTPVPANPP |
| | EVFTPAKFASFITQYSTGQVSVEIEWELQKENSKRWNPEIQYTSNFDKQTGVDFAVDSQG |
| | VYSEPRPIGTRYLTRNL |
| 1398 | MAPGKKRPVEPSPQRSPDSSTGIGKKGQQPARKRLNFGQTGDS |
| | ESVPDPQPIGEPPAGPSGLGSGTMAAGGGAPMADNNKGADGVGNASGNWHCDSTWLGDRV |
| | ITTSTRTWALPTYNNHLYKQISSQSAGSTNDNVYFGYSTPWGYFDFNRFHCHFSPRDWQR |
| | LINNNWGFRPKKLNFKLFNIQVKEVTTGDGVTTIANNLTSTVQVFSDSEYQLPYVLGSAH |
| | QGCLPPFPADVFMIPQYGYLTLNNDSQSVGRSSFYCLEYFPSQMLRTGNNFTFSYTFEDV |
| | PFHSSYAHSQSLDRLMNPLIDQYLYYLARTQSNAGGTAGNRELQFYQGGPTTMAEQAKNW |
| | LPGPCFRQQRVSKTLDQNNNSNFAWTGATKYHLNGRNSLVNPGVAMATHKDDEERFFPSS |
| | GVLIFGKTGAANKTTLENVLMTNEEEIRPTNPVATEEYGTVSSNLQAANTAAQTQVVNNQ |
| | GALPGMVWQNRDVYLQGPIWAKIPHTDGNFHPSPLMGGFGLKHPPPQILIKNTPVPANPP |
| | EVFTPAKFASFITQYSTGQVSVEIEWELQKENSKRWNPEIQYTSNFDKQTGVDFAVDSQG |
| | VYSEPRPIGTRYLTRNL |
| 1399 | MAPGKKRPVEPSPQRSPDSSTGIGKKGQQPARKRLNFGQTGDS |
| | ESVPDPQPIGEPPAGPSGLGSGTMAAGGGAPMADNNKGADGVGNASGNWHCDSTWLGDRV |
| | ITTSTRTWALPTYNNHLYKQISSQSAGSTNDNVYFGYSTPWGYFDFNRFHCHFSPRDWQR |
| | LINSNWGFRPKKLNFKLFNIQVKEVTTNDGVTTIANNLTSTVQVFSDSEYQLPYVLGSAH |
| | QGCLPPFPADVFMIPQYGYLTLNNGSQSVGRSSFYCLEYFPSQMLRTGNNFTFSYTFEDV |
| | PFHSSYAHSQSLDRLMNPLIDQYLYYLARTQSNAGGTAGNRELQFYQGGPTTMAEQAKNW |
| | LPGPCFRQQRVSKTLDQNNNSNFAWTGATKYHLNGRNSLVNPGVAMATHKDDEERFFPSS |
| | GVLIFGKTGAANKTTLENVLMTNEEEIRPTNPVATEEYGTVSSNLQAANTAAQTQVVNNQ |
| | GALPGMVWQNRDVYLQGPIWAKIPHTDGNFHPSPLMGGFGLKHPPPQILIKNTPVPANPP |
| | EVFTPAKFASFITQYSTGQVSVEIEWELQKENSKRWNPEIQYTSNFDKQTGVDFAVDSQG |
| | VYSEPRPIGTRYLTRNL |
| 1400 | MAPGKKRPVEPSPQRSPDSSTGIGKKGQQPARKRLNFGQTGDS |
| | ESVPDPQPLGEPPAGPSGLGSGTMAAGGGAPMADNNEGADGVGNASGNWHCDSTWLGDRV |
| | ITTSTRTWALPTYNNHLYKQISSQSAGSTNDNVYFGYSTPWGYFDFNRFHCHFSPRDWQR |
| | LINNNWGFRPKKLNFKLFNIQVKEVTTNDGVTTIANNLTSTVQVFSDSEYQLPYVLGSAH |
| | QGCLPPFPADVFMIPQYGYLTLNNGSQSVGRSSFYCLEYFPSQVLRTGNNFTFSYTFEDV |
| | PFHSSYAHSQSLDRLMNPLIDQYLYYLARTQSNPGGTSGNRELQFYQGGPSTMAEQAKNW |
| | LPGPCFRQQRVSKTLDQNNNSNFAWTGATKYHLNGRNSLVNPGVAMATHKDDEDRFFPSS |
| | GVLIFGKTGATNKTTLENVLMTNEEEIRPTNPVATEEYGIVSSNLQAANTAAQTQVVNNQ |
| | GALPGMVWQNRDVYLQGPIWAKIPHTDGNFHPSPLMGGFGLKHPPPQILIKNTPVPANPP |
| | EVFTPAKFASFITQYSTGQVSVEIEWELQKENSKRWNPEIQYTSNFDKQTGVDFAVDSQG |
| | VYSEPRPIGTRYLTRNL |
| 1401 | MAPGKKRPVEPSPQRSPDSSTGIGKKGQQPARKRLNFGQTGDS |
| | ESVPDPQPIGEPPAAPSSVGSGTMAAGGGAPMADNNEGADGVGSSSGNWHCDSTRLGDRV |
| | ITTSTRTWALPTYNNHLYKQISSQSAGSTNDNVYFGYSTPWGYFDFNRFHCHFSPRDWQR |
| | LINNNWGFRPKKLNFKLFNIQVKEVTTNDGVTTIANNLTSTVQVFSDSEYQLPYVLGSAH |
| | QGCLPPFPADVFMIPQYGYLTLNNGSQSVGRSSFYCLEYFPSQMLRTGNNFTFSYTFEDV |
| | PFHSSYAHSQSLDRLMNPLIDQYLYYLARTQSNAGGTAGNRELQFYQGGPTTMAEQAKNW |
| | LPGPCFRQRRVSKTLDQNNNSNFAWTGATKYHLNGRNSLVNPGVAMATHKDDEERFFPSS |
| | GVLIFGKTGAANKTTLENVLMTNEEEIRPTNPVATEEYGTVSSNLQAANTAAQTQVVNNQ |
| | GALPGMVWQNRDVYLQGPIWAKIPHTDGNFHPSPLMGGFGLKHPPPQILIKNTPVPANPP |
| | EVFTPAKFASFITQYSTGQVSVEIEWELQKENSKRWNPEIQYTSNFDKQTGVDFAVDSQG |
| | VYSEPRPIGTRYLTRNL |
| 1402 | MAPGKKRPVEPSPQRSPDSSTGIGKKGQQPARKRLNFGQTGDS |
| | ESVPDPQPIGEPPAAPSSVGSGTMAAGGGAPMADNNEGADGVGSSSGNWHCDSTWLGDRV |
| | ITTSTRTWALPTYNNHLYKQISNGTSGGSTNDNTYFGYSTPWGYFDFNRFHCHFSPRDWQ |
| | RLINNNWGFRPKRLSFKLFNIQVKEVTQNEGTKTIANNLTSTVQVFSDSEYQLPYVLGSA |
| | HQGCLPPFPADVFMIPQYGYLTLNNGSQSVGRSSFYCLEYFPSQMLRTGNNFTFSYTFED |
| | VPFHSSYAHSQSLDRLMNPLIDQYLYYLARTQSNAGGTAGNRELQFYQGGPTTMAEQAKN |
| | WLPGPCFRQQRVSKTLDQNNNSNFAWTGATKYHLNGRNSLVNPGVAMATHKDDEERFFPS |
| | SGVLIFGKTGAANKTTLENVLMTNEEEIRPTNPVATEEYGTVSSNLQAANTAAQTQVVNN |
| | QGALPGMVWQNRDVYLQGPIWAKIPHTDGNFHPSPLMGGFGLKHPPPQILIKNTPVPANP |
| | PEVFTPAKFASFITQYSTGQVSVEIEWELQKENSKRWNPEIQYTSNFDKQTGVDFAVDSQ |
| | GVYSEPRPIGTRYLTRNL |
| 1403 | MAPGKKRPVEPSPQRSPDSSTGIGKKGQQPARKRLNFGQTGDS |
| | ESVPDPQPIGEPPAGPSGLGSGTMAAGGGAPMADNNEGADGVGNASGNWHCDSTWLGDRV |
| | ITTSTRTWALPTYNNHLYKQISSQSAGSTNDNVYFGYSTPWGYFDFNRFHCHFSPRDWQR |
| | LINNNWGFRPKKLNFKLFNIQVKEVTTNDGVTTIANNLTSTVQVFSDSEYQLPYVLGSAH |
| | QGCLPPFPADVFMIPQYGYLTLNNGSQSVGRSSFYCLEYFPSQMLRTGNNFTISYTFEDV |
| | PFHSSYAHSQSLDRLMNPLIDQYLYYLARTQSNAGGTAGNQELQFYQGGPTTMAEQAKNW |
| | LPGPCFRQQRVSKTLDQNNNSNFAWTGATKYHLNGRNSLVNPGVAMATHKDDEERFFPSS |
| | GVLIFGKTGAANKTTLENVLMTNEEEIRPTNPVATEEYGTVSSNLQAANTAAQTQVVNNQ |
| | GALPGMVWQNRDVYLQGPIWAKIPHTDGNFHPSPLMGGFGLKHPPPQILIKNTPVPADPP |
| | TAFNQAKLNSFITQYSTGQVSVEIEWELQKENSKRWNPEIQYTSNYYKSTNVDFAVNTEG |
| | VYSEPRPIGTRYLTRNL |
| 1404 | MAPGKKRPVEPSPQRSPDSSTGIGKKGQQPARKRLNFGQTGDS |
| | ESVPDPQPIGEPPAAPSSVGSGTMAAGGGAPMADNNEGADGVGSSSGNWHCDSTWLGDRV |
| | ITTSTRTWALPTHNNHLYKQISNGTSGGSTNDNVYFGYSTPWGYFDFNRFHCHFSPRDRQ |
| | RLINNNWGFRPKRLSFKLFNIQVKEVTQNEGTKTIANNLTSTIQVFTDSEYQLPYVLGSA |
| | HQGCLPPFPADVFMIPQYGYLTLNNGSQAVGRSSFYCLEYFPSQMLRTGNNFSFSYTFED |
| | VPFHSSYAHSQSLDRLMNPLIDQYLYYLSRTQSTEGTAGTQQLLFSQAGPSNMSAQARNW |
| | LPGPCYRQQRVSTTLSQNNNSNFAWTGATKYHLNGRDSLVNPGVAMATHKDDEERFFPSS |
| | GVLIFGKTGAANKTTLENVLMTNEEEIRPTNPVATEEYGTVSSNLQAANTAAQTQVVNNQ |
| | GALPGMVWQNRDVYLQGPIWAKIPHTDGNFHPSPLMGGFGLKHPQILIKNTPVPANPPEV |
| | FTPAKFASFITQYSTGQVSVEIEWELQKENSKRWNPEIQYTSNFDKQTGVDFAVDSQGVY |
| | SEPRPIGTRYLTRNL |
| 1405 | MAPGKKRPVEQSPQEPDSSAGIGKSGSQPAKKKLNFGQTGDTE |
| | SVPDPQPIGEPPAAPSGVGSLTMASGGGAPVADNNEGADGVGSSSGNWHCDSQWLGDRVI |
| | TTSTRTWALPTYNNHLYKQISNSTSGGSSNDNAYFGYSTPWGYFDFNRFHCHFSPRDWQR |
| | LINNNWGFRPKRLNFKLFNIQVKEVTDNNGVKTIANNLTSTVQVFTDSDYQLPYVLGSAH |
| | EGCLPPFPADVFMIPQYGYLTLNDGGQAVGRSSFYCLEYFPSQMLRTGNNFQFSYEFENV |
| | PFHSSYAHSQSLDRLMNPLIDQYLYYLSKTINGSGQNQQTLKFSVAGPSNMAVQGRNYIP |
| | GPSYRQQRVSTTVTQNNNSEFAWPGASSWALNGRNSLMNPGPAMASHKEGEDRFFPLSGS |
| | LIFGKQGTGRDNVDADKVMITNEEEIKTTNPVATESYGQVATNHQSAQAQAQTGWVQNQG |
| | ILPGMVWQDRDVYLQGPIWAKIPHTDGNFHPSPLMGGFGMKHPPPQILIKNTPVPADPPT |
| | AFNKDKLNSFITQYSTGQVSVEIEWELQKENSKRWNPEIQYTSNYYKSNNVEFAVSTEGV |
| | YSEPRPIGTRYLTRNL |
| 1406 | MAPGKKRPVEQSPQEPDSSAGIGKSGSQPAKKKLNFGQTGDTE |
| | SVPDPQPIGEPPAAPSGVGSLTMASGGGAPVADNNEGADGVGSSSGNWHCDSQWLGDRVI |
| | TTSTRTWALPTYNNHLYKQISNSTSGGSSNDNAYFGYSTPWGYFDFNRFHCHFSPRDWQR |
| | LINNNWGFRPKRLNFKLFNIQVKEVTDNNGVKTIANNLTSTVQVFTDSDYQLPYVLGSAH |
| | EGCLPPFPADVFMIPQYGYLTLNDGSQAVGRSSFYCLEYFPSQMLRTGNNFQFSYEFENV |
| | PFHSSYAHSQSLDRLMNPLIDQYLYYLSKTINGSGQNQQTLKFSVAGPSNMAVQGRNYIP |
| | GPSYRQQRVSTTVTQNNNSEFAWPGASSWALNGRNSLMNPGPAMASHKEGEDRFFPLSGS |
| | LIFGKQGTGRDNVDADKVMITNEEEIKTTNPVATESYGQVATNHQSAQAQAQTGWVQNQG |
| | ILPGMVWQDRDVYLQGPIWAKIPHTDGNFHPSPLMGGFGMKHPPPQILIKNTPVPADPPT |
| | AFNKDKLNSFITQYSTGQVSVEIEWELQKENSKRWNPEIQYTSNYYKSNNVEFAVNTEGV |
| | YSEPRPIGTRYLTRNL |
| 1407 | MAPGKKRPVEHSPVEPDSSSGTGKAGQQPARKRLNFGQTGDAD |
| | SVPDPQPLGQPPAAPSGLGTNTMATGSGAPMADNNEGADGVGNSSGNWHCDSTWMGDRVI |
| | TTSTRTWALPTYNNHLYKQISSQSGASNDNHYFGYSTPWGYFDFNRFHCHFSPRDWQRLI |
| | NNNWGFRPKRLNFKLFNIQVKEVTQNDGTTTIANNLTGTVQVFTDSEYQLPYVLGSAHQG |
| | CLPPFPADVFMVPQYGYLTLNNGSQAVGRSSFYCLEYFPSQMLRTGNNFTFSYTFEDVPF |
| | HSSYAHSQSLGRLMNPLIDQYLYYLSRTNTPSGTTTQSRLQFSQAGASDIRDQSRNWLPG |
| | PCYRQQRVSKTSADNNNSEYSWTGATKYHLNGRDSLVNPGPAMASHKDDEEKFFPQSGVL |
| | IFGKQGSEKTNVDIEKVMITDEEEIRTTNPVATEQYGSVSTNLQRGNRQAATADVNTQGV |
| | LPGMVWQDRDVYLQGPIWAKIPHTDGHFHPSPLMGGFGLKHPPPQILIKNTPVPANPSTT |
| | FSAAKFASFITQYSTGQVSVEIEWELQKENSKRWNPEIQYTSNYNKSVNVDFTVDTNGVY |
| | SEPRPIGTRYLTRNL |
| 1408 | MAPGKKRPVEHSPVEPDSSSGTGKAGQQPARKRLNFGQTGDAD |
| | SVPDPQPLGQPPAAPSGLGTNTMATGSGAPMADNNEGADGVGNSSGNWHCDSTWMGDRVI |
| | TTSTRTWALPTYNNHLYKQISSQSGASNDNHYFGYSTPWGYFDFNRFHCHFSPRDWQRLI |
| | NNNWGFRPKRLNFKLFNIQVKEVTQNDGTTTIANNLTSTVQVFTDSEYQLPYVLGSAHQG |
| | CLPPFPADVFMVPQYGYLTLNNESQAVGRSSFYCLEYFPSQMLRTGNNFTFSYTFEDVPF |
| | HSSYAHSQSLGRLMNPLIDQYLYYLSRTNTPSGTTTQSRLQFSQAGASDIRDQSRNWLPG |
| | PCYRQQRVSKTSADNNNSEYSWTGATKYHLNGRDSLVNPGPAMASHKDDEEKFFPQSGVL |
| | IFGKQGSEKTNVDIEKVMITDEEEIRTTNPVATEQYGSVSTNLQRGNRQAATADVNTQGV |
| | LPGMVWQDRDVYLQGPIWAKIPHTDGHFHPSPLMGGFGLKHPPPQILIKNTPVPANPSTT |
| | FSAAKFASFITQYSTGQVSVEIEWELQKENSKRWNPEIQYTSNYNKSVNVDFTVDINGVY |
| | SEPRPIGTRYLTRNL |
| 1409 | MAPGKKRPVEHSPVEPDSSSGTGKAGQQPARKRLNFGQTGDAD |
| | SVPDPQPLGQPPAAPSGLGTNTMATGSGAPMADNNEGADGVGNSSGNWHCDSTWMGDRVI |
| | TTSTRTWALPTYNNHLYKQISSQSGASNDNHYFGYSTPWGYFDFNRFHCHFSPRDWQRLI |
| | NNNWGFRPKRLNFKLFNIQVKEVTQNDGTTTIANNLTSTVQVFTDSEYQLPYVLGSAHQG |
| | CLPPFPADVFMVPQYGYLTLNNGSQAAGRSSFYCLEYFPSQMLRTGNNFTFSYTFEDVPF |
| | HSSYAHSQSLGRLMNPLIDQYLYYLSRTNTPSGTTTQSRLQFSQAGASDIRDQSRNWLPG |
| | PCYRQQRVSKTSADNNNSEYSWTGATKYHLNGRDSLVNPGPAMASHKDDEEKFFPQSGVL |
| | IFGKQGSEKTNVDIEKVMITDEEEIRTTNPVATEQYGSVSTNLQRGNRQAATADVNTQGV |
| | LPGMVWQDRDVYLQGPIWAKIPHTDGHFHPSPLMGGFGLKHPPPQILIKNTPVPANPSTT |
| | FSAAKFASFITQYSTGQVSVEIEWELQKENSKRWNPEIQYTSNYNKSVNVDFTVDTNGVY |
| | SEPRPIGTRYLTRNL |
| 1410 | MAPGKKRPVEHSPVEPDSSSGTGKAGQQPARKRLNFGQTGDAD |
| | SVPDPQPLGQPPAAPSGLGTNTMATGSGAPMADNNEGADGVGNSSGNWHCDSTWMGDRVI |
| | TTSTRTWALPTYNNHLYKQISSQSGASNDNHYFGYSTPWGYFDFNRFHCHFSPRDWQRLI |
| | NNNWGFRPKRLNFKLFNIQVKEVTQNDGTTTIANNLTSTVQVFTDSGYQLPYVLGSAHQG |
| | CLPPFPADVFMVPQYGYPTLNNGSQAVGRSSFYCLEYFPSQMLRTGNNFTFSYTFEDVPF |
| | HSSYAHSQSLDRLMNPLIDQYLYYLSTTNTPSGTTTQSRLQFSQAGASDIRDQSRNWLPG |
| | PCYRQQRVSKTSADNNNSEYSWTGATKYHLNGRDSLVNPGPAVASHKDDEEKFFPQSGVL |
| | IFGKQGSEKTNVDIEKVMITDEEEIRTTNPVATEQYGSVSTNLQRGNRQAATADVNTQGV |
| | LPGMVWQDRDVYLQGPIWAKIPHTDGHFHPSPLMGGFGLKHPPPQILIKNTPVPANPSTT |
| | FSAAKFASFITQYSTGQVSVEIEWELQKENSKRWNPEIQYTSNYNKSVNVDFTVDINGVY |
| | SEPRPIGTRYLTRNL |
| 1411 | MAPGKKRPVEHSPVEPDSSSGTGKAGQQPARKRLNFGQTGDAD |
| | SVPDPQPLGQPPAAPSGLGTNTMATGSGAPMADNNEGADGVGNSSGNWHCDSTWMGDRVI |
| | TTSTRTWALPTYNNHLYKQISSQSGASNDSHYFGYSTPWGYFDFNRFHCHFSPRDWQRLI |
| | NNNWGFRPKRLNFKLFNIQVKEVTQNDGTTTIANNLTSTVQVFTDSEYQLPYVLGSAHQG |
| | CLPPFPADVFMVPQYGYLTLNNGSQAVGRSSFYCLEYFPSQMLRTGNNFTFSYTFEDVPF |
| | HSSYAHSQSLDRLMNPLIDQYLYYLSTTNTPSGTTTQSRLQFSQAGASDIRDQSRNWLPG |
| | PCYRQQRVSKTSADNNNSEYSWTGATKYHLNGRDSLVNPGPAMASHKDNEEKFFPQSGVL |
| | IFGKQGSEKTNVDIEKVMITDEEEIRTTNPVATEQYGSVSTNLQRGNRQAATADVNTQGV |
| | LPGMVWQDRDVYLQGPIWAKIPHTDGHFHPSPLMGGFGLKHPPPQILIKNTPVPANPSTT |
| | FSAAKFASFITQYSTGQVSVEIEWELQKENSKRWNPEIQYTSNYNKSVNVDFTVDTNGVY |
| | SEPRPIGTRYLTRNL |
| 1412 | MAPGKKRPVEHSPAEPDSSSGTGKAGQQPARKRLNFGQTGDAD |
| | SVPDPQPLGQPPAAPSGLGTNTMASGSGAPMADNNEGADGVGNSSGNWHCDSTWMGDRVI |
| | TTSTRTWALPTYNNHLYKQISSQSGASNDNHYFGYSTPWGYFDFNRFHCHFSPRDWQRLI |
| | NNNWGFRPKRLNFKLFNIQVKEVTQNDGTTTIANNLTSTVQVFTDSEYQLPYVLGSAHQG |
| | CLPPFPADVFMVPQYGYLTLNNGSQAVGRSSFYCLEYFPSQMLRTGNNFTFSYTFEDVPF |
| | HSSYAHSQSLDRLMNPLIDQYLYYLSRTNTPSGTTTQSRLQFSQAGASDIRDQSRNWLPG |
| | PCYRQQRVSKTSADNNNSEYSWTGATKYHLNGRDSLVNPGPAMASHKDDEEKFFPQSGVL |
| | IFGKQGSEKTNVDIEKVMITDEEEIRTTNPVATEQYGSVSTNLQGGNTQAATADVNTQGV |
| | LPGMVWQDRDVYLQGPIWAKIPHTDGHFHPSPLMGGFGLKHPPPQILIKNTPVPANPSTT |
| | FSAAKFASFITQYSTGQVSVEIEWELQKENSKRWNPEIQYTSNYNKSVNVDFTVDTNGVY |
| | SEPRPIGTRYLTRNL |
| 1413 | MAPGKKRPVEHSPAEPDSSSGTGKSGNQPARKRLNFGQTGDSD |
| | SVPDPQPLGQPPAAPSGLGTNTMATGSGAPMADNNEGADGVGNSSGNWHCDSTWMGDRVI |
| | TTSTRTWALPTYNNHLYKQISSQSGASNDNHYFGYSTPWGYFDFNRFHCHFSPRDWQRLI |
| | NNNWGFRPKRLNFKLFNIQVKEVTQNDGTTTIANNLTSTVQVFTDSEYQLPYVLGSAHQG |
| | CLPPFPADVFMVPQYGYLTLNNGSQAVGRSSFYCLEYFPSQMLRTGNNFTFSYTFEDVPF |
| | HSSYAHSQSLDRLMNPLIDQYLYYLSRTNTPSGTTTQSRLQFSQAGASDIQDQSRNWLPG |
| | PCYRQQRVSKTSADNNNSEYSWTGATKYHLNGRDSLVNPGPAMASHKDDEEKFFPQSGVL |
| | IFGKQGSEKTNVDIEKVMITDEEEIRTTNPVATEQYGSVSTNLQSGNTQAATADVNTQGV |
| | LPGMVGQDRDVYLQGPTWAKIPHTDGHFHPSPLMGGFGLKHPPPQILIKNTPVPANPSTT |
| | FSAAKFASFITQYSTGQVSVEIEWELQKENSKRWNPEIQYTSNYNKSVNVDFTVDTNGVY |
| | SEPRPIGTRYLTRNL |
| 1414 | MAPGKKRPVEHSPAEPDSSSGTGKSGNQPARKRLNFGQTGDSD |
| | SVPDPQPLGQPPAAPSGLGTNTMATGSGAPMADNNEGADGVGNSSGNWHCDSTWMGDRVI |
| | TTSTRTWALPTYNNHLYKQISSQSGASNDNHYFGYSTPWGYFDFNRFHCHFSPRDWQRLI |
| | NNNWGFRPKRLNFKLFNIQVKEVTQNDGTTTIANNLTSTVQVFTDSEYQLPYVLGSAHQG |
| | CLPPFPADVFMVPQYGYLTLNNGSQAVGRSSFYCLEYFPSQMLRTGNSFTFSYTFEDVPF |
| | HSSYAHSQSLDRLMNPLIDQYLYYLSRTNTPSGTTTQSRLQFSQAGASDIRDQSRNWLPG |
| | PCYRQQRVSKTSADNNNSEYSWTGATKYHLNGRDSLVNPGPAMASHKDDEEKFFPQSGVL |
| | IFGKQGSEKTNVDIEKVMITDEEEIRTTNPVATEQYGSVSTNLQSGNTQAATADVNTQGV |
| | LPGMVWQDRDVYLQGPIWAKIPHTDGHFHPSPLMGGFGLKHPPPQILIKNTPVPANPSTT |
| | FSAAKFASFITQYSTGQVSVEIEWELQKENSKRWNPEIQYTSNYNKSVNVDFTVDINGVY |
| | SEPRPIGTRYLTRNL |
| 1415 | MAPGKKRPVEHSPAEPDSSSGTGKSGNQPARKRLNFGQTGDSD |
| | SVPDPQPLGQPPAAPSGLGTNTMATGSGAPMADNNEGADGVGNSSGNWHCDSTWMGDRVI |
| | TTSTRTWALPTYNNHLYKQISSQSGASNDNHYFGYSTPWGYFDFNRFHCHFSPRDWQRLI |
| | NNNWGFRPKRLNFKLFNIQVKEVTQNDGTTTIANNLTSTVQVFTDSEYQLPYVLGSAHQG |
| | CLPPFPADVFMVPQYGYLTLNNGSQAVGRSSFYCLGYFPSQMLRTGNNFTFSYTFEDVPF |
| | HSSYAHSQSLDRLMNPLIDQYLYYLSRTNTPSGTTTQSRLQFSQAGASDIRDQSRNWLPG |
| | PCYRQQRVSKTSADNNNSEYSWTGATKYHLNGRDSLVNPGPAMASHKDDEEKFFPQSGVL |
| | IFGKQGPEKTNVDIEKVMITDEEEIRTTNPVATEQYGSVSTNLQSGNTQAATADVNTQGV |
| | LPGMVWQDRDVYLQGPIWAKIPHTDGHFHPSPLMGGFGLKHPPPQILIKNTPVPANPSTT |
| | FSAAKFASFITQYSTGQVSVEIEWELQKENSKRWNPEIQYTSNYNKSVNVDFTVDINGVY |
| | SEPRPIGTRYLTRNL |
| 1416 | MAPGEKRPVEHSPAEPDSSSGTGKAGQQPARKRLNFGQTGDAD |
| | SVPDPQPLGQPPAAPSGLGTNTMASGSGAPMADNNEGADGVGNSSGNWYCDSTWMGDRVI |
| | TTSTRTWALPTYNNHLYKQISSQSGASNDNHYFGYSTPWGYFDFNRFHCHFSPRDWQRLI |
| | NNNWGFRPKRLSFKLFNIQVKEVTQNDGTTTIANNLTSTVQVFTDSEYQLPYVLGSAHQG |
| | CLPPFPADVFMVPQYGYLTLNNGSQAVGRSSFYCLEYFPSQMLRTGNNFTFSYTFEDVPF |
| | HSSYAHSQSLDRLMNPLIDQYLYYLSRTNTPSGTTTMSRLQFSQAGASDIRDQSRNWLPG |
| | PCYRQQRVSKTAADNNNSDYSWTGATKYHLNGRDSLVNPGPAMASHKDDEEKYFPQSGVL |
| | IFGKQDSGKTNVDIEKVMITDEEEIRTTNPVATEQYGSVSTNLQSGNTQAATSDVNTQGV |
| | LPGMVWQDRDVYLQGPIWAKIPHTDGHFHPSPLVGGFGLKHPPPQILIKNTPVPANPSTT |
| | FSAAKFASFITQYSTGQVSVEIEWELQKENSKRWNPEIQYTSNYNKSVNVDFTVDTNGVY |
| | SEPRPIGTRYLTRNL |
| 1417 | MAPGEKRPVEHSPAEPDSSSGTGKAGQQPARKRLNFGQTGDAD |
| | SVPDPQPLGQPPAAPSGLGTNTMASGSGAPMADNNEGADGVGNSSGNWHCDSTWMGDRVI |
| | TTSTRTWALPTYNNHLYKQISSQSGASNDNHYFGYSTPWGHFDFNRFHCHFSPRDWQRLI |
| | NNNWGFRPKRLSFKLFNIQVKEVTQNDGTTTIANNLTSTVQVFTDSEYQLPYVLGSAHQG |
| | CLPPFPADVFMVPQYGYLTLNNGSQAVGRSSFYCLEYFPSQMLRTGNNFTFSYTFEDVPF |
| | HSSYAHSQSLDRLMNPLIDQYLYYLSRTNTPSGTTTMSRLQFSQAGASDIRDQSRNWLPG |
| | PCYRQQRVSKTAADNNNSDYSWTGATKYHLNGRDSLVNPGPAMASHKDDEEKYFPQSGVL |
| | IFGKQDSGKTNVDIEKVMITDEEEIRTTNPVATEQYGSVSTNLQSGNTQAATSDVNTQGV |
| | LPGMVWQDRDVYLQGPIWAKIPHTDGHFHPSPPMGGFGLKHPPPQILIKNTPVPANPSTT |
| | FSAAKFASFITQYSTGQVSVEIEWELQKENSKRWNPEIQYTSNYNKSVNVDFTVDTNGVY |
| | SEPRPIGARYLTRNL |
| 1418 | MAPGKKRPVEHSPAEPDSSSGTGKAGQQPARKRLNFGQTGDAD |
| | SVPDPRPLGQPPAAPSGLGTNTMASGSGAPMADNNEGADGVGNSSGNWHCDSTWMGDRVI |
| | TTSTRTWALPTYNNHLYKQISSQSGASNDNHYFGYSTPWGYFDFNRFHCHFSPRDWQRLI |
| | NNNWGFRPKRLSFKLFNIQVKEVTQNDGTTTIANNLTSTVQVFTDSEYQLPYVLGSAHQG |
| | CLPPFPADVFMVPQYGYLTLNNGSQAVGRSSFYCLEYFPSQMLRTGNNFTFSYTFEDVPF |
| | HSSYAHSQSLDRLMNPLIDQYLYYLSRTNTPSGTTTMSRLQFSQAGASDIRDQSRNWLPG |
| | PCYRQQRVSKTAADNNNSDYSWTGATKYHLNGRDSLVNPGPAMASHKDDEEKYFPQSGVL |
| | IFGKQDSGKTNVDIEKVMITDEEEIRTTNPVATEQYGSVSTNLQSGNTQAATSDVNTQGV |
| | LPGMVWQDRDVYLQGPIWAKIPHTDGHFHPSPLMGGFGLKHPPPQILIKNTPVPANPSTT |
| | FSAAKFASFITQYSTGQVSVEIEWELQKENSKRWNPEIQYTSNYNKSVNVDFTVDINGVY |
| | SEPRPIGTRYLTRNL |
| 1419 | MAPGKKRPVEHSPAEPDSSSGTGKAGQQPARKRLNFGQTGDAD |
| | SVPDPRPLGQPPAAPSGLGTNTMASGSGAPMADNNEGADGVGNSSGNWHCDSTWMGDRVI |
| | TTSTRTWALPTYNNHLYKQISSQSGASNDNHYFGYSTPWGYFDFNRFHCHFSPRDWQRLI |
| | NNNWGFRPKRLSFKLFNIQVKEVTQNDGTTTIANNLTSTVQVFTDSEYQLPYVLGSAHQG |
| | CLPPFPADVFMVPQYGYLTLNNGSQAVGRSSFYCLEYFPSQMLRTGNNFTFSYTFEDVPF |
| | HSSYAHSQSLDRLMNPLIDQYLYYLSRTNTPSGTTTMSRLQFSQAGASDIRDQSRNWLPG |
| | PCYRQQRVSKTAADNNNSDYSWTGATKYHLNGRDSLVNPGPAMASHKDDEEKYFPQSGVL |
| | IFGKQDSGKTNVDIEKVMITDEEEIRTTNPVATEQYGSVSTNLQSGNTQAATSDVNTQGV |
| | LPGMVWQDRDVYLQGPIWAKIPHTDGHFHPSPLMGGFGLKHPPPQILIKNTPVPANPSTT |
| | FSAAKFASFITQYSTGQVSVEIEWELQKENSKRWNPEIQYTSNYNKSVNVDFTVDTNGVY |
| | SEPRPIGTRYLTRNL |
| 1420 | MAPGKKRPVEHSPAEPDSSSGTGKAGQQPARKRLNFGQTGDAD |
| | SVPDPQPLGQPPAAPSGLGTNTMASGSGAPMADNNEGADGVGNSSGNWHCDSTWMGDRVI |
| | TTSTRTWALPTCNNHLYKQISSQSGASNDNHYFGYSTPWGYFDFNRFHCHFSPRDWQRLI |
| | NNNWGFRPKRLSFKLFNIQVKEVTQNDGTTTIANNLTSTVQVFTDSEYQLPYVLGSAHQG |
| | CLPPFPADVFMVPQYGYLTLNNGSQAVGRSSFYCLEYFPSQMLRTGNNFTFSYTFEDVPF |
| | HSSYAHSQSLDRLMNPLIDQYLYYLSRTNTPSGTTTMSRLQFSQAGASDIRDQSRNWLPG |
| | PCYRQQRVSKTAADNNNSDYSWTGATKYHLNGRDSLVNPGPAMASHKDDEEKYFPQSGVL |
| | IFGKQDSGKTNVDIEKVMITDEEEIRTTNPVATEQYGSVSTYLQSGNTQAATSDVNTQGV |
| | LPGMVWQDRDVYLRGPIWAKIPHTDGHFHPSPLMGGFGLKHPPPQILIKNTPVPANPSTT |
| | FSAAKFASFITQYSTGQVSVEIEWELQKENSKRWNPEIQYTSNYNKSVNVDFTVDTNGVY |
| | SEPRPIGTRYLTRNL |
| 1421 | MAPGKKRPVEHSPAEPDSSSGTGKAGQQPARKRLNFGQTGDAD |
| | SVPDPQPLGQPPAAPSGLGTNTMASGSGAPMADNNEGADGVGNSSGNWHCDSTWMGGRVI |
| | TTSTRTWALPTYNNHLYKQISSQSGASNDNHYFGYSTPWGYFDFNRFHCHFSPRDWQRLI |
| | NNNWGFRPKRLSFKLFNIQVKEVTQNDGTTTIANNLTSTVQVFTDSEYQLPYVLGSAHQG |
| | CLPPFPADVFMVPQYGYLTLNNGSQAVGRSSFYCLEYFPSQTLRTGNNFTFSYTFEDVPF |
| | HSSYAHSQSLDRLMNPLIDQYLYYLSRTNTPSGTTTMSRLQFSQAGASDIRDQSRNWLPG |
| | PCYRQQRVSKTAADNNNSDYSWTGATKYHLNGRDSLVNPGPAMASHKDDEEKYFPQSGVL |
| | IFGKQDSGKTNVDIEKVMITDEEEIRTTNPVATEQYGSVSTNLQSGNTQAATSDVNTQGV |
| | LPGMVWQDRDVYLQGPIWAKIPHTDGHFHPSPLMGGFGLKHPPPQILIKNTPVPANPSTT |
| | FSAAKFASFITQYSTGQVSVEIEWELQKENSKRWNPEIQYTSNYNKSVNVDFTVDTNGVY |
| | SEPRPIGTRYLTRNL |
| 1422 | MAPGKKRPVEHSPAEPDSSSGTGKAGQQPARKRLNFGQTGDAD |
| | SVPDPQPLGQPPAAPSGLGTNTMASGSGAPMADNNEGADGVGNSSGNWHCDSTWMGDRVI |
| | TTSTRTWALPTYNNHLYKQISSQSGASNDNHYFGYSTPWGYFDFNRFHCHFSPRDWQRLI |
| | NNNWGFRPKRLSFKLFNIQVKEVTQNDGTTTIANNLTSTVQVFTDSEYQLPYVLGSAHQG |
| | CLPPFPADVFMVPQYGYLTLNNGSQAVGRSSFYCLEYFPSQMLRTGNNFTFSYTFEDVPF |
| | HSSYAHSQSLDRLMNPLIDQYLYYLSRTNTPSGTTTMSRLQFSQAGASDIRDQSRNWLPG |
| | PCYRQQRVSKTAADNNNSDYSWTGATKYHLNGRDSLVNPGPAMASHKDDEEKYFPQSGVL |
| | IFGKQDSGKTNVDIEKVMITDEEEIRTTNPVATEQYGSVSTNLQSGNTQAATSDVNTQGV |
| | LPGMVWQDRDVYLQGPIWAKIPHTDGHFHPSPLMGGFGLKHPPPQILIKNTPVPANPSTT |
| | FSAAKFASFITQYSTGQVSVEIEWELQKENSKRWNPEIQYTSNYNKSVNVDFTVDTNGVY |
| | SEPRPIGTRYLTRNL |
| 1423 | MAPGKKRPVEHSPAEPDSSSGTGKAGQQPARKRLNFGQTGDAD |
| | SVPDPQPLGQPPAAPSGLGTNTMASGSGAPMADNNEGADGVGNSSGNWHCDSTWMGDRVI |
| | TTSTRTWALPTYNNHLYKQISSQSGASNDNHYFGYSTPWGYFDFNRFHCHFSPRDWQRLI |
| | NNNWGFRPKRLSFKLFNIQVKEVTQNDGTTTIANNLTSTVQVFTDSGYQLPYVLGSAHQG |
| | CLPPFPADVFMVPQYGYLTLNNGSQAVGRSSFYCLEYFPSQMLRTGNNFTFSYTFEDVPF |
| | HSSYAHGQSLDRLMNPLIDQYLYYLSRTNTPSGTTTMSRLQFSQAGASDVRDQSRNWLPG |
| | PCYRQQRVSKTAADNNNSDYSWTGATKYHLNGRDSLVNPGPAMASHKDDEEKYFPQSGVL |
| | VFGKQDSGKTNVDIEKVMITDEEEIRTTNPAATEQYGSVSTNLQSGNTQAATSDVNTQGV |
| | LPGMVWQDRDVYLQGPIWAKIPHTDGHFHPSPLMGGFGLKHPPPQILIKNTPVPANPSTT |
| | FSAAKFVSFITQYSTGQVSVEIEWELQKENSKRWNPEIQYTSNYNKSVNVDFTVDINGVY |
| | SEPRPIGTRYLTRNL |
| 1424 | MAPGKKRPVEHSPVEPDSSSGTGKAGQQPARKRLNFGQTGDAD |
| | SVPDPQPLGQPPAAPSGLGSTTMATGSGAPMADNNEGADGVGNSSGNWHCDSQWLGDRVI |
| | TTSTRTWALPTYNNHLYKQISSQSGASNDNHYFGYSTPWGYFDFNRFHCHFSPRDWQRLV |
| | NNNRGFRPKRLNFKLFNIQVKEVTQNDGTTTIANNLTSTVQVFTDSEYQLPYVLGSAHQG |
| | CLPPFPADVFMVPQYGYLTLNNGSQAVGRSSFYCLEYFPSQMLRTGNNFQFSYTFEDVPF |
| | HSSYAHSQSLDRLMNPLIDQYLYYLNKTQTNSGTLQQSRLLFSQAGPTNMSLQAKNWLPG |
| | PCYRQQRLSKQANDNNNSNFPWTAATKYHLNGRDSLVNPGPAMASHKDDEEKFFPMHGTL |
| | IFGKQGTNANDADLENVMITDEEEIRATNPVATEQYGTVSNNLQNSNTGPTTGTVNHQGA |
| | LPGMVWQDRDVYLQGPIWAKIPHTDGHFHPSPLMGGFGLKHPPPQIMIKNTPVPANPPTN |
| | FSSAKFASFITQYSTGQVSVEIEWELQKENSKRWNPEIQYTSNYNKSVNVDFTVDINGVY |
| | SEPRPIGTRYLTRNL |
| 1425 | MAPGKKRPVEHSPVEPDSSSGTGKAGQQPARKRLNFGQTGDAD |
| | SVPDPQPLGQPPAAPSGLGSTTMATGSGAPMADNNEGADGVGNSSGNWHCDSQWLGDRVI |
| | TTSTRTWALPTYNNHLYKQISSQSGASNDNHYFGYSTPWGYFDFNRFHCHFSPRDWQRLI |
| | NNNWGFRPKRLNFKLFNIQVKEVTQNDGTTTIANNLTSTVQVFTDSEYQLPYVLGSAHQG |
| | CLPPFPADVFMVPQYGYLTLNNGSQAVGRSSFYCLEYFPSQMLRTGNNFQFSYTFEDVPF |
| | HSSYAHSQSLDRLMNPLIDQYLYYLNKTQTNSGTLQQSRLLFSQAGPTNMSLQAKNWLPG |
| | PCYRQQRLSKQANDNNNSNFPWTAATKYHLNGRDSLVNPGPAMASRKDDEEKFFPMHGTL |
| | IFGKQGTNANDADLENVMITDEEEIRATNPVATEQYGTVSNNLQNSNTGPTTGTVNHQGA |
| | LPGMVWQDRDVYLQGPIWAKIPHTDGHFHPSPLMGGFGLKHPPPQIMIKNTPVPANPPTN |
| | FSSAKFASFITQYSTGQVSVEIEWELQKENSKRWNPEIQYTSNYNKSVNVDFTVDTNGVY |
| | SEPRPIGTRYLTRNL |
| 1426 | MAPGKKRPVEHSPVEPDSSSGTGKAGQRPARKRLNFGQTGDAD |
| | SVPDPQPLGQPPAAPSGLGSTTMATGSGAPMADNNEGADGVGNSSGNWHCDSQWLGDRVI |
| | TTSTRTWALPTYNNHLYKQISSQSGASNDNHYFGYSTPWGYFDFNRFHCHFSPRDWQRLI |
| | NNNWGFRPKRLNFKLFNIQVKEVTQNDGTTTIANNLTSTVQVFTDSEYQLPYVLGSAHQG |
| | CLPPFPADVFMVPQYGYLTLNNGSQAVGRSSFYCLEYFPSQMLRTGNNFQFSYTFEDVPF |
| | HSSYAHSQSLDRLMNPLIDQYLYYLNKTQTNSGTLQQSRLLFSQAGPTNMSLQAKNWLPG |
| | PCYRQQRLSKQANDNNNSNFPWTAATKYHLNGRDSLVNPGPAMASHKDDEEKFFPMHGTL |
| | IFGKQGTNANDADLENVMITDEEEIRATNPVATEQYGTVSNNLQNSNTGPTTGTVNRQGA |
| | LPGMVWQDRDVYLQGPIWAKIPHTDGHFHPSPLMGGFGLKHPPPQIMIKNTPVPANPPTN |
| | FSSAKFASFITQYSTGQVSVEIEWELQKENSKRWNPEIQYTSNYNKSVNVDFTVDTNGVY |
| | SEPRPIGTRYLTRNL |
| 1427 | MAPGKKRPVEHSPVEPDSSSGTGKAGQQPARKRLNFGQTGDAD |
| | SVPDPQPLGQPPAAPSGLGSTTMATGSGAPMADNNEGADGVGNSSGNWHCDSQWLGDRVI |
| | TTSTRTWALPTYNNHLYKQISSQSGASNDNHYFGYSTPWGYFDFNRFHCHFSPRDWQRLI |
| | NNNWGFRPKRLNFKLFNIQVKEVTQNGGTTTIANNLTSTVQVFTDSEYQLPYVLGSAHQG |
| | CLPPFPADVFMVPQYGYLTLNNGSQAVGRSSFYCLEYFPSQMLRTGNNFQFSYTFEDVPF |
| | HSSYAHSQSLDRLMNPLIDQYLYYLNKTQTNSGTLQQSRLLFSQAGPTNMSLQAKNWLPG |
| | PCYRQQRLSKQANGNNNSNFPWTAATKYHLNGRDSLVNPGPAMASHKDDEEKFFPMHGTL |
| | IFGKQGTNANDADLENVMITDEEEIRATNPVATEQYGTVSNNLQNSNTGPTTGTVNHQGA |
| | LPGMVWQDRDVYLQGPIWAKIPHTDGHFHPSPLTGGFGLKHPPPQIMIKNTPVPANPPTN |
| | FSSAKFASFITQYSTGQVSVEIEWELQKENSKRWNPEIQYTSNYNKSVNVDFTVDTNGVY |
| | SEPRPIGTRYLTRNL |
| 1428 | MAPGKKRPVEHSPVEPDSSSGTGKAGQQPARKRLNFGQTGDA |
| | DSVPDPQPLGQPPAAPSGLGSTTMATGSGAPMADNNEGADGVGNSSGNWHCDSQWLDDRV |
| | IATSTRTWALPTYNNHLYKQISSQSGACNDNHYFGYSTPWGYFDFNRFHCHFSPRDWQRL |
| | INSNWGFRPKRLNFKLFNIQVKEVTQNDGTTTIANNLTSTVQVFTDSEYQLPYVPGSAHQ |
| | GCLPPFPADVFMVPQYGYLTLNNGSQAVGRSSFYCLEYFPSQMLRTGNNFQFSYTFEDVP |
| | FHSSYAHCQSLDRLMNPLIDQYLYYLNKTQTNSGTLQQSRLLFSQAGPTNMSLQAKNWLP |
| | GPCYRQQRLSKQANDNNNCNFPWTAATKYHLNGRDSLVNPGPAMASHKDDEEKFFPMHGT |
| | LIFGKQGTNANDADLENVMITDEEEIRPTNPVATEQYGTVSNNLQNSNTGPTTGTVNHQG |
| | ALPGMVWQDRDVYLQGPIWAKIPHTDGHFHPSPLMGGFGLKHPPPQIMIKSTPVPANPPT |
| | NFSSAKFASSITQYSTGQVSVEIEWELQKENSKRWNPEIQYTSNYNKSVNVDFTVDTNGV |
| | YSEPRPIGTRYLTRNL |
| 1429 | MAPGKKRPVEHSPAEPDSSSGTGKAGQQPARKRLNFGQTGDAD |
| | SVPDPQPLGQPPAAPSGLGSTTMATGSGAPMADNNEGADGVGNSSGNWHCDSQWLGDRVI |
| | TTSTRTWALPTYNNHLYKQISSQSGASNDNHYFGYSTPWGYFDFNRFHCHFSPRDWQRLI |
| | NNNWGFRPKRLNFKLFNIQVKEVTQNDGTTTIANNLTSTVQVFTDSEYQLPYVLGSAHQG |
| | CLPPFPADVFMVPQYGYLTLNNGSQAVGRSPFYCLEYFPSQMLRTGNNFQFSYTFEDVPF |
| | HSSYAHSQSLDRLMNPLIDQYLYYLNKTQTNSGTLQQSRLLFSQAGPTNMSLQAKNWLPG |
| | PCYRQQRLSKQANDNNNSNFPWTAATKYHLNGRDSLVNPGPAMASHKDDEEKFFPMHGTL |
| | IFGKQGTNANDADLENVMITDEEEIRTTNPVATEQYGTVSNNLQNSNTGPTTGTVNHQGA |
| | LPGMVWQDRDVYLQGPIWAKIPHTDGHFHPSPLMGGFGLKHPPPQIMIKNTPVPANPPTN |
| | FSSAKFASFITQYSTGQVSVEIEWELQKENSKRWNPEIQYTSNYNKSVNVDFTVDNNGVY |
| | SEPRPIGTRYLTRNL |
| 1430 | MAPGKKRPVEHSPVEPDSSSGTGKAGNQPARKRLNFGQTGDAD |
| | SVPDPQPLGQPPAAPSGLGSTTMATGSGAPVADNNEGADGVGNSSGNWHCDSQWLGDRVI |
| | TTSTRTWALPTYNNHLYKQISSQSGASNDNHYFGYSTPWGYFDFNRFHCHFSPRDRQRLI |
| | NNNWGFRPKRLNFKLFNIQVKEVTQNDGTTTIANNLTSTVQVFTDSGYQLPYVLGLAHQG |
| | CLPPFPADVFMVPQYGYLTLNNGSQAVGRSSFYCLEYFPSQMLRTGNNFQFSYTFEDVPF |
| | HSSYAHSQSLDRLMNPLIDQYLYYLNKTQSNSGTLQQSRLLFSQAGPTSMSLQAKNWLPG |
| | PCYRQQRLSKQANDNNNSNFPWTAATKYHLNGRDSLVNPGPAMASHKDDEEKFFPMHGTL |
| | IFGKQGTNANDADLDNVMITDEEEIRTTNPVATEQYGYVSNNLQNSNTGPTTGTVNHQGA |
| | LPGMVWQDRDVYLQGPIWAKIPHTDGHFHPSPLMGGFGLKHPPPQIMIKNTPVPANPPTN |
| | FSSAKFASFITQYSTGQVSVEIEWELQKEDSKRWNPEIQYTSNYNKPVNVDFTVDINGVY |
| | SEPRPIGTRYLTRNL |
| 1431 | MAPGKKRPVEHSPVEPDSSSGTGKAGNQPARKRLNFGQTGDAD |
| | SVPDPQPLGQPPAAPSGLGSTTMATGSGAPVADNNEGADGVGNSSGNWHCDSQWLGDRVI |
| | TTSTRTWALPTYNNHLYKQISSQSGASNDNHYFGYSTPWGYFDFNRFHCHFSPRDWQRLI |
| | NNNWGFRPKRLNFKLFNIQVKEVTQNDGTTTIANNLTSTVQVFTDSEYQLPYVLGSAHQG |
| | CLPPFPADVFMVPQYGYLTLNNGSQAVGRSSFYCLEYFPSQMLRTGNNFQFSYTFEDVPF |
| | HSSYAHSQSLDRLMNPLIDQYLYYLNKTQSNSGTLQQSRLLFSQAGPTSMSLQAKNWLPG |
| | PCYRQQRLSKQANDNNNSNFPWTAATKYHLNGRDSLVNPGPAMASHKDDEEKFFPMHGTL |
| | IFGKQGTNANDADLDNVMITDEEEIRTTNPVATEQYGYVSNNLQDSNTGPTTGTVNHQGA |
| | LPGMVWQDRDVYLQGPIWAKIPHTDGHFHPSPLMGGFGLKHPPPQIMIKNTPVPANPPTN |
| | FSSAKFASFITQYSTGQVSVEIEWELQKENSKRWNPEIQYTSNYNKSVNVDFTVDTNGVY |
| | SEPRPIGTRYLTRNL |
| 1432 | MAPGKKRPVEHSPVEPDSSSGTGKAGQQPARKRLNFGQTGDAD |
| | SVPDPQPLGQPPAAPSGLGSTTMASGSGAPVADNNEGADGVGNSSGNWHCDSQWLGDRVI |
| | TTSTRTWALPTYNNHLYKQISSQSGASNDNHYFGYSTPWGYFDFNRFHCHFSPRDWQRLI |
| | NNSWGFRPKRLNFKLFNIQVKEVTQNDGTTTIANNLTSTVQVFTDSEYQLPYVLGSAHQG |
| | CLPPFPADVFMVPQYGYLTLNNGSQAVGRSSFYCLEYFPSQMLRTGNNFQFSYTFEDVPF |
| | HSSYAHSQSLDRLLNPLIDQYLYYLNKTQSNSGTLQQSRLLFSQAGPTSMSLQAKNWLPG |
| | PCYRQQRLSKQANDNNNSNFPWTAATKYHLNGRDSLVNPGPAMASHKDDEEKFFPMHGTL |
| | IFGKQGTNANDADLDNVMITDEEEIRTTNPVATEQYGYVSNNLQNSNTGPTTGTVNHQGA |
| | LPGMVWQDRDVYLQGPIWAKIPHTDGHFHPSPLMGGFGLKHPPPQIMIKNTPVPANPPTN |
| | FSSSKFASFITQYSTGQVSVEIEWELQKENSKRWNPEIQYTSNYNKSVNVDFTVDTNGVY |
| | SEPRPIGTRYPTRNL |
| 1433 | MAPGKKRPVEHSPAEPDSSSGTGKAGQQPARKRLNFGQTGDAD |
| | SVPDPQPLGQPPAAPSGLGSTTMATGSGAPMADNNEGADGVGNSSGNWHCDSQWLGDRVI |
| | TTSTRTWALPTYNNHLYKQISSQSGASNDNHYFGYSTPWGYFDFNRFHCHFSPRDWQRLI |
| | NNNWGFRPKRLNFKLFNIQVKEVTQNDGTTTIANNLTSTVQVFTDSEYQLPYVLGSAHQG |
| | CLPPFPADVFMVPQYGYLTLNNGSQAVGRSSFYCLEYFPSQMLRTGNNFQFSYTFEDVPF |
| | HSSYAHSQSLDRLMNPLIDQYLYYLNKTQSNSGTLQQSRLLFSQAGPTSMSLQAKNWLPG |
| | PCYRQQRLSKQANDNNNSNFPWTAATKYHLNGRDSLVNPGPAMASHKDDEEKFFPMHGTL |
| | IFGKQGTNANDADLDNVMITDEEEIRTTNPVATEQYGYVSNNLQNSNTGPTTGTVNHQGA |
| | LPGMVWQDRDVYLQGPIWAKIPHTDGHFHPSPLMGGFGLKHPPPQIMIKNTPVPANPPTN |
| | FSSAKFASFITQYSTGQVSVEIEWELQKENSKRWNPEIQYTSNYNKSVNVDFTVDINGVY |
| | SEPRPIGTRYLTRNL |
| 1434 | MAPGKKRPVEHSPAEPDSSSGTGKAGQQPARKRLNFGQTGDAD |
| | SVPDPQPLGQPPAAPSGLGSTTMATGSGAPMADNNEGADGVGNSSGNWHCDSQWLGDRVI |
| | TTSTRTWALPTYNNHLYKQISSQSGASNDNHYFGYSTPWGYFDFNRFHCHFSPRDWQRLI |
| | NNNWGFRPKRLNFKLFNIQVKEVTQNDGTTTIANNLTSTVQVFTDSEYQLPYVLGSAHQG |
| | CLPPFPADVFMVPQYGYLTLNNGSQAVGRSSFYCLEYFPSQMLRTGNNFQFSYTFEDVPF |
| | HSSYAHSQSLDRLMNPLIDQYLYYLNKTQSNSGTLQQSRLLFSQAGPTSMSLQAKNWLPG |
| | PCYRQQRLSKQANDNNNSNFPWTAATKYHLNGRDSLVNPGPAMASHKDDEEKFFPMHGTL |
| | IFGKQGTNANDADLDNVMITDEEEIRTTNPVATEQYGYVSNNLQNSNTGPTTGTVNHQGA |
| | LPGMVWQDRDVYLQGPIWAKIPHTDGHFHPSPLMGGFGLKHPPPQIMIKNTPVPANPPTN |
| | FSSAKFASFITQYSTGQVSVEIEWELQKENSKRWNPEIQYTSNYNKSVNVDFTVDINGVY |
| | SEPRPIGTRYLTRNL |
| 1435 | MAPGKKRPVEHSPAEPDSSSGTGKAGQQPARKRLNFGQTGDAD |
| | SVPDPQPLGQPPAAPSGLGSTTMATGSGAPMADNNEGADGVGNSSGNWHCDSQWLGDRVI |
| | TTSTRTWAQPTYNNHLYKQISSQSGASNDNHYFGYSTPWGYFDFNRFHCHFSPRDWQRLI |
| | NNNWGFRPKRLNFKLFNIQVKEVTQNDGTTTIANNLTSTVQVFTDSEYQLPYVLGSAHQG |
| | CLPPFPADVFMVPQYGYLTLNNGSQAVGRSSFYCLEYFPSQMLRTGNNFQFSYTFEDVPF |
| | HSSYAHSQSLDRLMNPLIDQYLYYLNKTQSNSGALQQSRLLFSQAGPTSMSLQAKNWLPG |
| | PCYRQQRLSKQANDNNNSNFPWTAATKYHLNGRDSLVNPGPAMASHKDDEEKFFPMHGTL |
| | IFGKQGTNANDADLDNVMITDEEEIRTTNPVATEQYGYVSNNLQNSNTGPTTGTVNHRGA |
| | LPGMVWQDRDVYLQGPIWAKIPHTDGHFHPSPLMGGFGLKHPPPQIMIKNTPVPANPPTN |
| | FSSAKFASFITQYSTGQVSVEIEWELQKENSKRWNPEIQYTSNYNKSVNVDFTVDINGVY |
| | SEPRPIGTRYLTRNL |
| 1436 | MAPGKKRPVEQSPQEPDSSAGIGKSGAQPAKKRLNFGQTGDTESVPDPQPIGEPPAAPSG |
| | VGSLTMASGGGAPVADNNEGADGVGSSSGNWHCDSQWLGDRVITTSTRTWALPTYNNHLY |
| | KQISNSTSGGSSNDNAYFGYSTPWGYFDFNRFHCHFSPRDWQRLINNNWGFRPKRLNFKL |
| | FNIQVKEVTDNNGVKTIANNLTSTVQVFTDSDYQLPYVLGSAHEGCLPPFPADVFMIPQY |
| | GYLTLNDGSQAVGRSSFYCLEYFPSQMLRTGNNFQFSYEFENVPFHSSYAHSQSLDRLMN |
| | PLIDQYLYYLSKTINGSGQNQQTLKFSVAGPSNMAVQGRNYIPGPSYRQQRVSTTVTQNN |
| | NSEFAWPGASSWALNGRNSLMNPGPAMASHKEGEDRFFPLSGSLIFGKQGTGRDNVDADK |
| | VMITNEEEIKTTNPVATESYGQVATNHQSNSRGDYNSLAQAQTGWVQNQGILPGMVWQDR |
| | DVYLQGPIWAKIPHTDGNFHPSPLMGGFGMKHPPPQILIKNTPVPADPPTAFNKDKLNSF |
| | ITQYSTGQVSVEIEWELQKENSKRWNPEIQYTSNYYKSNNVEFAVNTEGVYSEPRPIGTR |
| | YLTRNL |
| 1437 | MAPGKKRPVEQSPQEPDSSAGIGKSGAQPAKKRLNFGQTGDTESVPDPQPIGEPPAAPSGV |
| | GSLTMASGGGAPVADNNEGADGVGSSSGNWHCDSQWLGDRVITTSTRTWALPTYNNHLYK |
| | QISNSTSGGSSNDNAYFGYSTPWGYFDFNRFHCHFSPRDWQRLINNNWGFRPKRLNFKLF |
| | NIQVKEVTDNNGVKTIANNLTSTVQVFTDSDYQLPYVLGSAHEGCLPPFPADVFMIPQYG |
| | YLTLNDGSQAVGRSSFYCLEYFPSQMLRTGNNFQFSYEFENVPFHSSYAHSQSLDRLMNP |
| | LIDQYLYYLSKTINGSGQNQQTLKFSVAGPSNMAVQGRNYIPGPSYRQQRVSTTVTQNNN |
| | SEFAWPGASSWALNGRNSLMNPGPAMASHKEGEDRFFPLSGSLIFGKQGTGRDNVDADKV |
| | MITNEEEIKTTNPVATESYGQVATNHQSGQSGRGDAVGVAQAATGWVQNQGILPGMVWQD |
| | RDVYLQGPIWAKIPHTDGNFHPSPLMGGFGMKHPPPQILIKNTPVPADPPTAFNKDKLNS |
| | FITQYSTGQVSVEIEWELQKENSKRWNPEIQYTSNYYKSNNVEFAVNTEGVYSEPRPIGT |
| | RYLTRNL |
| 1438 | MAPGKKRPVEQSPQEPDSSAGIGKSGAQPAKKRLNFGQTGDTESVPDPQPIGEPPAAPSG |
| | VGSLTMASGGGAPVADNNEGADGVGSSSGNWHCDSQWLGDRVITTSTRTWALPTYNNHLY |
| | KQISNSTSGGSSNDNAYFGYSTPWGYFDFNRFHCHFSPRDWQRLINNNWGFRPKRLNFKL |
| | FNIQVKEVTDNNGVKTIANNLTSTVQVFTDSDYQLPYVLGSAHEGCLPPFPADVFMIPQY |
| | GYLTLNDGSQAVGRSSFYCLEYFPSQMLRTGNNFQFSYEFENVPFHSSYAHSQSLDRLMN |
| | PLIDQYLYYLSKTINGSGQNQQTLKFSVAGPSNMAVQGRNYIPGPSYRQQRVSTTVTQNN |
| | NSEFAWAAASSWALNGRNSLMNPGPAMASHKEGEDRFFPLSGSLIFGKQGTGRDNVDADK |
| | VMITNEEEIKTTNPVATESYGQVATNHQSGQSGRGDLGLSAQAATGWVQNQGILPGMVWQ |
| | DRDVYLQGPIWAKIPHTDGNFHPSPLMGGFGMKHPPPQILIKNTPVPADPPTAFNKDKLN |
| | SFITQYSTGQVSVEIEWELQKENSKRWNPEIQYTSNYYKSNNVEFAVNTEGVYSEPRPIG |
| | TRYLTRNL |
| 1439 | MAPGKKRPVEHSPVEPDSSSGTGKAGHQPARKRLNFGQTGDAD |
| | SVPDPQPLGQPPAAPTSLGSTTMATGSGAPMADNNEGADGVGNSSGNWHCDSQWLGDRVI |
| | TTSTRTWALPTYNNHLYKQISSQSGASNDNHYFGYSTPWGYFDFNRFHCHFSPRDWQRLI |
| | NNNWGFRPKRLNFKLFNIQVKEVTQNDGTTTIANNLTSTVQVFTDSEYQLPYVLGSAHQG |
| | CLPPFPADVFMVPQYGYLTLNNGSQAVGRSSFYCLEYFPSQMLRTGNNFTFSYTFEDVPF |
| | HSSYAHSQSLDRLMNPLIDQYLYYLNRTQSNSGTLQQSRLLFSQAGPTSMSLQAKNWLPG |
| | PCYRQQRLSKQANDNNNSNFPWTAATKYRLNGRDSLVNPGPAMASHKDDEEKFFPMHGTL |
| | IFGKQGTNANDADLEHVMITDEEEIRTTNPVATEQYGNVSNNLQNSNTGPTTENVNHQGA |
| | LPGMVWQDRDVYLQGPIWAKIPHTDGHFHPSPLMGGFGLKHPPPQIMIKNTPVPANPPTN |
| | FSSAKFASFITQYSTGQVSVEIEWELQKENSKRWNPEIQYTSNYNKSVNVDFTVDTNGVY |
| | SEPRPIGTRYLTRNL |
| 1440 | MAPGKKRPVEHSPVEPDSSSGTGKAGHQPARKRLNFGQTGDAD |
| | SVPDPQPLGQPPAAPTSLGSTTMATGSGAPMADNNEGADGVGNSSGNWHCDSQWLGDRVI |
| | TTSTRTWALPTYNNHLYKQISSQSGASNDNHYFGYSTPWGYFDFNRFHCHFSPRDWQRLI |
| | NNNWGFRPKRLNFKLFNIQVKEVTQNDGTTTIANNLTSTVQVFTDSEYQLPYVLGSAHQG |
| | CLPPFPADVFMVPQYGYLTLNNGSQAVGRPSFYCLEYFPSQMLRTGNNFTFSYTFEDVPF |
| | HSSYAHSQSLDRLMNPLIDQYLYYLNRTQSNSGTLQQSRLLFSQAGPTSMSLQAKNWLPG |
| | PCYRQQRLSKQANDNNNSNFPWTAATKYHLNGRDSLVNPGPAMASHKDDEEKFFPMHGTL |
| | IFGKQGTNANDADLEHVMITDEEEIRTTNPVATEQYGNVSNNLQNSNTGPTTENVNHQGA |
| | LPGMVWQDRDVYLQGPIWAKIPHTDGHFHPSPLMGGFGLKHPPPQIMIKNTPVPANPPTN |
| | FSSAKFASFITQYSTGQVSVEIEWELQKENSKRWNPEIQYTSNYNKSVNVDFTVDTNGVY |
| | SEPRPIGTRYLTRNL |
| 1441 | MAPGKKRPVEHSPVEPDSSSGTGKAGHQPARKRLNFGQTGDAD |
| | SVPDPQPLGQPPAAPTSLGSTTMATGSGAPMADNNEGADGVGNSSGNWHCDSQWLGDRVI |
| | TTSTRTWALPTYNNHLYKQISSQSGASNDNHYFGYSTPWGYFDFNRFHCHFSPRDWQRLI |
| | NNNWGFRPKRLNFKLFNIQVKEVTQNDGTTTIANNLTSTVQVFTDSEYQLPYVLGSAHQG |
| | CLPPFPADVFMVPQYGYLTLNNGSQAVGRPSFYCLEYFPSQMLRTGNNFTFSYTFEDVPF |
| | HSSYAHSQSLDRLMNPLIDQYLYYLNRTQSNSGTLQQSRLLFSQAGPTSMSLQAKNWLPG |
| | PCYRQQRLSKQANDNNNSNFPWTAATKYHLNGRDSLVNPGPAMASHKDDEEKFFPMHGTL |
| | IFGKQGTNANDADLEHVMITDEEEIRTTNPVATEQYGNVSNNLQNSNTGPTTENVNHQGA |
| | LPGMVWQDRDVYLQGPIWAKIPHTDGHFHPSPLMGGFGLKHPPPQIMIKNTPVPANPPTN |
| | FSSAKFASFITQYSTGQVSVEIEWELQKENSKRWNPEIQYTSNYNKSVNVDFTVDINGVY |
| | SEPRPIGTRYLTRNL |
| 1442 | MAPGKKRPVEHSPVEPDSSSGTGKAGHQPARKRLNFGQTGDAD |
| | SVPDPQPLGQPPAAPTSLGSTTMATGSGAPMADNNEGADGVGNSSGNWHCDSQWLGDRVI |
| | TTSTRTWALPTYNNHLYKQISSQSGASNDNHYFGYSTPWGYFDFNRFHCHFSPRDWQRLI |
| | NNNWGFRPKRLNFKLFNIQVKEVTQNDGTTTIANNLTSTVQVFTDSEYQLPYVLGSAHQG |
| | CLPPFPADVFTVPQYGYLTLNNGSQAVGRSSFYCLEYFPSQMLRTGNNLTFSYTFEDVPF |
| | HSSYAHSQSLDRLMNPLIDQYLYYLNRTQSNSGTLQQSRLLFSQAGPTSMSLQAKNWLPG |
| | PCYRQQRLSKQANDNNNSNFPWTAATKYHLNGRDSLVNPGPAMASHKDDEEKFFPMHGTL |
| | IFGKQGTNANDADLEHVMITDEEEIRTTNPVATEQYGNVSNNLQNSNTGPTTENVNHQGA |
| | LPGMVWQDRDVYLQGPIWAKIPHTDGHFHPSPLMGGFGLKHPPPQIMIKNTPVPANPPTN |
| | YSSAKFASFITQYSTGQVSVEIEWELRKENSKRWNPEIQYTSNYNKSVNVDFTVDINGVY |
| | SEPRPIGTRYLTRNL |
| 1443 | MAPGKKRPVEQSPQEPDSSSGIGKTGQQPAKKRLNFGQTGDSE |
| | SVPDPQPLGEPPATPAAVGPTTMASGGGAPMADNNEGADGVGNASGNWHCDSTWLGDRVI |
| | TTSTRTWALPTYNNHLYKQISSTSTGASNDNHYFGYGTPWGYFDFNRFHCHFSPRDWQRL |
| | INNNWGFRPKRLNFKLFNIQVEEVTTNDGVTTIANNLTSTVQVFSDSEYQLPYVLGSAHQ |
| | GCLPPFPADVFMIPQYGYLTLNNGSQAVGRSSFYCLEYFPSQMLRTGNNFTFSYTFEEVP |
| | FHSSYAHSQSLDRLMNPLIDQYLYYLNRTQNQSGSAQNKDLLFSRGSPAGMSVQPKNWLP |
| | GPCYRQQRVSKTKTDNNNSNFTWTGASKYNLNGRESIINPGTAVASHKDDEDKFFPMSGV |
| | MIFGKESAGASSTALDNVMITDEEEIKATNPVATERFGTVAVNFQSSSTDPATGDVHAMG |
| | ALPGMVWQDRDVYLQGPIWAKIPHTDGHFHPSPLMGGFGLKNPPPQILIKNTPVPANPPA |
| | EFSATKFASFITQYSTGQVSVEIEWELQKENSKRWNPEVQYTSNYAKSANVDFTVDNNGL |
| | YTEPRPIGTRYLTRPL |
| 1444 | MAPGKKRPVEQSPQGPDSSSGIGKTGQQPAKKRLNFGQTGDSE |
| | SVPDPQPLGEPPATPAAVGPTTMASGGGAPMADNNEGADGVGNASGNWHCDSTWLGDRVI |
| | TTSTRTWALPTYNNHLYKQISSASTGASNDNHYFGYSTPWGYFDFNRFHCHFSPRDWQRL |
| | INNNWGFRPKRLNFKLFNIQVKEVTTNDGVTTIANNLTSTVQVFSDSEYQLPYVLGSAHQ |
| | GCLPPFPADVFMIPQYGYLTLNNGSQAVGRSSFYCLEYFPSQMLRTGNNFTFSYTFEEVP |
| | FHSSYAHSQSLDRLMNPLIDQYLYYPNRTQNQSGSAQNKDLLFSRGSPAGMSVQPKNWLP |
| | GPCYRQQRVSKTKTDNNNSNFTWTGASKYNLNGRESIINPGTAMASHKDDEDKFFPMSGV |
| | MIFGKESAGASNTALDNVMITDEEEIKATNPVATERFGTVAVNFQSSSTDPATGDVHAMG |
| | ALPGMVWQGRDVYLQGPIWAKIPHTDGHFHPSPLMGGFGLKNPPPQILIKNTPVPANPPA |
| | EFSATKFASFITQYSTGQVSVEIEWELQKENSKRWNPEVQYTSNYAKSANVDFTVDNNGL |
| | YTEPRPIGTRYLTRPL |
| 1445 | MAPGKKRPVEQSPQEPDSPSGIGKTGQQPAKKRLNFGQTGDSE |
| | SVPDPQPLGEPPATPAAVGPTTMASGGGAPMADNNEGADGVGNASGNWHCDSTWLGDRVI |
| | TTSTRTWALPTYNNHLYKQISSASTGASNDNHYFGYSTPWGYFDFNRFHCHFSPRDWQRL |
| | INNNWGFRPKRLNFKLFNIQVKEVTTNDGVTTIANNLTSTVQVFSDSEYQLPYVLGSAHQ |
| | GRLPPFPADVFMIPQYGYLTLNNGSQAVGRSSSYCLEYFPSQMLRTGNNFTFSYTFEEVP |
| | LHSSCAHSQSLDRLMNPLIDQYLYYLNRTQNQSGSAQNRDLLFSRGSPAGMSVQPKNWLP |
| | GPCYRQQRVSKTKTDNNNSNFTWTGASKYNLNGRESIINPGTAMASHKDDEDKFFPMSGV |
| | MIFGKESAGASNTALDNVMITDEEEIKATNPVATERFGTVAVNFQSSSTDPATGDVHAMG |
| | ALPGMVWQDRDVYLQGPIWAKIPHTDGHFHPSPLMGGFGLKNPPPQILIKNTPVPANPPA |
| | EFSATKFASFITQYSAGQVSVEIEWELQKENSKRWNPEVQYTSNYAKSANVDFTVDNNGL |
| | YTEPRPIGTRYLTRPL |
| 1446 | MAPGKKRPVEPSPQRSPDSSTGIGKKGQQPAKKRLNFGQTGDS |
| | ESVPDPQPIGEPPAGPSGLGSGTMAAGGGAPMADNNEGADGVGNASGNWHCDSTWLGDRV |
| | ITTSTRTWALPTYNNHLYKQISSASTGASNDNHYFGYSTPWGYFDFNRFHCHFSPRDWQR |
| | LINNNWGFRPKRLNFKLFNIQVKEVTTNDGVTTIANNLTSTVQVFSDSEYQLPYVLGSAH |
| | QGCLPPFPADVFMIPQYGYLTLNNGSQAVGRSSFYCLEYFPSQMLRTGNNFTFSYTFEEV |
| | PLHSSYAHSQSLDRLMNPLIVQYLYYLNRTQNQSGSAQNKDLLFSRGSPAGMSVQPKNWL |
| | PGPCYRQQRVSKTKTDNNNSNFTWTGASKYNLNGRESIINPGTAMASHKDDEDKFFPMSG |
| | VMIFGKESAGASNTALDNVMITDEEEIKATNPVATERFGTVAVNFQSSSTDPATGDVHAM |
| | GALPGMVWQDRDVYLQGPIWAKIPHTDGHFHPSPLMGGFGLKNPPPQILIKNTPVPANPP |
| | AEFSATKFASFITQYSTGQVSVEIEWELQKENSKRWNPEVQYTSNYAKSASVDFTVDNNG |
| | LYTEPRPIGTRYLTRPL |
| 1447 | MAPGKKRPVEPSPQRSPDSSTGIGKKGQQPAKKRLNFGQTGDS |
| | ESVPDPQPIGEPPAGPSGLGSGTMAAGGGAPMADNNEGADGVGSSSGNWHCDSTWLGDRV |
| | ITTSTRTWALPTYNNHLYKQISNGTSGGSTNDNTYFGYSTPWGYFDFNRFHCHFSPRDWQ |
| | RLINNNWGFRPKRLSFKLFNIQVKEVTQNEGTKTIANNLTSTIQVFTDSEYQLPYVLGSA |
| | HQGCLPPFPADVFMIPQYGYLTLNNGSQAVGRSSFYCLEYFPSQMLRTGNNFEFSYTFED |
| | VPFHSSYAHSQSLDRLMNPLIDQYLYYLSRTQSTGGTQGTQQLLFSQAGPANMSAQAKNW |
| | LPGPCYRQQRVSTTLSQNNNSNFAWTGATKYHLNGRDSLVNPGVAMATHKDDEERFFPSS |
| | GVLMFGKQGAGRDNVDYSSVMLTSEEEIKTTNPVATEQYGVVADNLQQTNTGPIVGNVNS |
| | QGALPGMVWQNRDVYLQGPIWAKIPHTDGNCHPSPLMGGFGLKHPPPQILIKNTPVPADP |
| | PTTFSQAKLASFITQYSTGQVSVEIEWELQKENSKRWNPEIQYTSNYYKSTNVDFAVNTE |
| | GTYSEPRPIGTRYLTRNL |
| 1448 | MAPGKKRPVEQSPQEPDSSSGIGKTGQQPAKKRLNFGQTGDSE |
| | SVPDPQPLGEPPATPAAVGPTTMASGGGAPMADNNEGADGVGNASGNWHCDSTWLGDRVI |
| | TTSTRTWALPTYNNHLYKQISSASTGASNDNHYFGYSTPWGYFDFNRFHCHFSPRDWQRL |
| | INNNWGFRPKRLNFKLFNIQVKEVTTNDGVTTIANNLTSTVQVFSDSEYQLPYVLGSAHQ |
| | GCLPPFPADVFMIPQYGYLTLNNGSQAVGRSSFYCLEYFPSQMLRTGNNFTFSYTFEEVP |
| | FHSSYAHSQSLDRLMNPLIDQYLYYLNRTQNQSGSAQNKDLLFSRGSPAGMSVQPKNWLP |
| | GPCYRQQRVSKTKTDNNNSNFTWTGASKYNLNGRESIINPGTAMASHKDDEDKFFPMSGV |
| | MIFGKESAGASNTALDNVMITDEEEIKATNPVATERFGTVAVNFQSSSTDPATGDVHAMG |
| | ALPGMVWQDRDVYLQGPIWAKIPHTDGHFHPSPLMGGFGLKNPPPQILIKNTPVPANPPA |
| | EFSATKFASFITQYSTGQVSVEIEWELQKENSKRWNPEVQYTSNYAKSANVDFTVDNNGL |
| | YTEPRPIGTRYLTRPL |
| 1449 | MAPGKKRPVEQSPQEPDSSSGIGKKGQQPARKRLNFGQTGDSE |
| | SVPDPQPLGEPPAAPSGVGPNTMAAGGGAPMADNNEGADGVGSSSGNWHCDSTWLGDRVI |
| | TTSTRTWALPTYNNHLYKQISNGTSGGATNDNTYFGYSTPWGYFDFNRFHCHFSPRDWQR |
| | LINNNWGFRPKRLSFKLFNIQVKEVTQNEGTKTIANNLTSTIQVFTDSEYQLPYVLGSAH |
| | QGCLPPFPADVFMIPQYGYLTLNNGSQAVGRSSFYCLEYFPSQMLRTGNNFQFTYTFEDV |
| | PFHSSYAHSQSLDRLMNPLIDQYLYYLSRTQTTGGTANTQTLGFSQGGPNTMANQAKNWL |
| | PGPCYRQQRVSTTTGQNNNSNFAWTAGTKYHLNGRNSLANPGIAMATHKDDEERFFPVTG |
| | SCFWQQNAARDNADYSDVMLTSEEEIKTTNPVATEEYGIVADNLQQQNTAPQIGTVNSQG |
| | ALPGMVWQNRDVYLQGPIWAKIPHTDGNFHPSPLMGGFGLKHPPPQILIKNTPVPADPPT |
| | TFNQSKLNSFITQYSTGQVSVEIEWELQKENSKRWNPEIQYTSNYYKSTSVDFAVNTEGV |
| | YSEPRPIGTRYLTRNL |
| 1450 | MAPGKKRPVEHSPVEPDSSSGTGKAGQQPARKRLNFGQTGDAD |
| | SVPDPQPLGQPPAAPSGLGTNTMATGSGAPMADNNEGADGVGNSSGNWHCDSTWMGDRVI |
| | TTSTRTWALPTYNNHLYKQISSQSGASNDNHYFGYSTPWGYFDFNRFHCHFSPRDWQRLI |
| | NNNWGFRPKRLNFKLFNIQVKEVTQNDGTTTIANNLTSTVQVFTDSEYQLPYVLGSAHQG |
| | CLPPFPADVFMVPQYGYLTLNNGSQAVGRSSFYCLEYFPSQMLRTGNNFTFSYTFEDVPF |
| | HSSYAHSQSLGRLMNPLIDQYLYYLSRTNTPSGTTTQSRLQFSQAGASDIRDQSRNWLPG |
| | PCYRQQRVSKTSADNNNSEYSWTGATKYHLNGRDSLVNPGPAMASHKDDEEKFFPQSGVL |
| | IFGKQGSEKTNVDIEKVMITDEEEIRTTNPVATEQYGSVSTNLQRGNRQAATADVNTQGV |
| | LPGMVWQDRDVYLQGPIWAKIPHTDGHFHPSPLMGGFGLKHPPPQILIKNTPVPANPSTT |
| | FSAAKFASFITQYSTGQVSVEIEWELQKENSKRWNPEIQYTSNYNKSVNVDFTVDTNGVY |
| | SEPRPIGTRYLTRNL |
| 1451 | MAPGKKRPVEHSPVEPDSSSGTGKAGQQPARKRLNFGQTGDAD |
| | SVPDPQPLGQPPAAPSGLGSTTMATGSGAPMADNNEGADGVGNSSGNWHCDSQWLGDRVI |
| | TTSTRTWALPTYNNHLYKQISSQSGASNDNHYFGYSTPWGYFDFNRFHCHFSPRDWQRLI |
| | NNNWGFRPKRLNFKLFNIQVKEVTQNDGTTTIANNLTSTVQVFTDSEYQLPYVLGSAHQG |
| | CLPPFPADVFMVPQYGYLTLNNGSQAVGRSSFYCLEYFPSQMLRTGNNFQFSYTFEDVPF |
| | HSSYAHSQSLDRLMNPLVDQYLYYLNKTQTNSGTLQQSRLLFSQAGPTNMSLQAKNWLPG |
| | PCYRQQRLSKQANDNNNSNFPWTAATKYHLNGRDSLVNPGPAMASHKDDEEKFFPMHGTL |
| | IFGKQGTNANDADLENVMITDEEEIRTTNPVATEQYGTVSNNLQNSNTGPTTGTVNHQGA |
| | LPGMVWQDRDVYLQGPIWAKIPHTDGHFHPSPLMGGFGLKHPPPQIMIKNTPVPANPPTN |
| | FSSAKFASFITQYSTGQVSVEIEWELQKENSKRWNPEIQYTSNYNKSVNVDFTVDTNGVY |
| | SEPRPIGTRYLTRNL |
| 1452 | MAPGKKRPVEHPPVEPDSSSGTGKAGQQPARKRLNFGQTGDAD |
| | SVPDPQPLGQPPAAPSGLGSTTMATGSGAPMADNNEGADGVGNSSGNWHCDSQWLGDRVI |
| | TTSTRTWALPTYNNHLYKQISSQSGASNDNHYFGYSTPWGYFDFNRFHCHFSPRDWQRLI |
| | NNNWGFRPKRLNFKLFNIQVKEVTQNDGTTTIANNLTSTVQVFTDSEYQLPYVLGSAHQG |
| | CLPPFPADVFMVPQYGYLTLNNGSQAVGRSSFYCLEYFPSQMLRTGNNFQFSYTFEDVPF |
| | HSSYAHSQSLDRLMNPLIDQYLYYLNKTQTNSGTLQQSRLLFSQAGPTNMSLQAKNRLPG |
| | PCYRQQRLSKQANDNNNSNFPWTAATKYHLNGRDSLVNPGPAMASHKDDEEKFFPMHGTL |
| | IFGKQGTNANDADLENVMITDEEEIRTTNPVATEQYGTVSNNLQNSNTGPTTGTVNHQGA |
| | LPGMVWQDRDVYLQGPIWAKIPHTDGHFHPSPLVGGFGLKHPPPQIMIKNTPVPANPPTN |
| | FSSAKFASFITQYSTGQVSVEIEWELQKENSKRWNPEIQYTSNYNKSVNVDFTVDTNGVY |
| | SEPRPIGTRYLTRNL |
| 1453 | MAPGKKRPVEHSPAEPDSSSGTGKAGQQPARKRLNFGQTGDAD |
| | SVPDPQPLRQPPAAPTSLGSTTMATGSGAPMADNNEGADGVGNSSGNWHCDSQWLGDRVI |
| | TTSTRTWALPTYNNHLYKQISSQSGASNDNHYFGYSTPWGYFDFNRFHCHFSPRDWQRLI |
| | NNNWGFRPKRLNFKLFNIQVKEVTQNDGTTTIANNLTSTVQVFTDSEYQLPYVLGSAHQG |
| | CLPPFPADVFMVPQYGYLTLNNGSQAVGRSSFYCLEYFPSQMLRTGNNFQFSYTFEDVPF |
| | HSSYAHSQSLDRLMNPLIDQYLYYLNRTQTASGTQQSRLLFSQAGPTSMSLQAKNWLPGP |
| | CYRQQRLSKQANDNNNSNFPWTGATKYYLNGRDSLVNPGPAMASHKDDEEKFFPMHGTLI |
| | FGKEGTNATNAELENVMITDEEEIRTTNPVATEQYGYVSNNLQNSNTAASTETVNHQGAL |
| | PGMVWQDRDVYLQGPIWAKIPHTDGHFHPSPLMGGFGLKHPPPQIMIKNTPVPANPPTNF |
| | SSAKFASFITQYSTGQVSVEIEWELQKENSKRWNPEIQYTSNYNKSVNVDFTVDINGVYS |
| | EPRPIGTRYLTRNL |
| 1454 | MAPGKKRPVEHSPAEPDSSSGTGKAGQQPARKRLNFGQTGDAD |
| | SVPDPQPLGQPPAAPTSLGSTTMATGSGAPMADNNEGADGVGNSSGNWHCDSQWLGDRVI |
| | TTSTRTWALPTYNNHLYKQISSQSGASNDNHYFGYSTPWGYFDFNRFHCHFSPRDWQRLI |
| | NNNWGFRPKRLNFKLFNIQVKEVTQNDGTTTIANNLTSTVQVFTDSEYQLPYVLGSAHQG |
| | CLPPFPADVFMVPQYGYLTLNNGSQAVGRSSFYCLECFPSQMLRTGNNFQFSYTFEDVPF |
| | HSSYAHSQSLDRLMNPLIDQYLYYLNRTQTASGTQQSRLLFSQAGPTSMSLQAKNWLPGP |
| | CYRQQRLSKQANDNNNSNFPWTGATKYHLNGRDSLVNPGPAMASHKDDEEKFFPMHGTLI |
| | FGKEGTNATNAELENVMITDEEEIRTTNPVATEQYGYVSNNLQNSNTAASTETVNHQGAL |
| | PGMVWQDRDVYLQGPIWAKIPHTDGHFHPSPLMGGFGLKHPPPQIMIKNTPVPANPPTNF |
| | SSAKFASFITQYSTGQVSVEIEWELQKENSKRWNPEIQYTSNYNKSVNVDFTVDTNGVYS |
| | EPRPIGTRYLTRNL |
| 1455 | MAPGKKRPVEHSPAEPDSSSGTGKAGQQPARKRLNFGQTGDAD |
| | SVPDPQPLGQPPAAPTSLGSTTMATGSGAPMADNNEGADGVGNSSGNWHCDSQWLGDRVI |
| | TTSTRTWALPTYNNHLYKQISSQSGASNDNHYFGYSTPWGYFDFNRFHCRFSPRDWQRLI |
| | NNNWGFRPKRLNFKLFNIQVKEVTQNDGTTTIANNLTSTVQVFTDSEYQLPYVLGSAHQG |
| | CLPPFPADVFMVPQYGYLTLNNGSQAVGRSSFYCLEYFPSQMLRTGNNFQFSYTFEDVPF |
| | HSSYAHSQGLDRLMNPLIDQYLYYLNRTQTASGTQQSRLLFSQAGPTSMSLQAKNWLPGP |
| | CYRQQRLSKQANDNNNSNFPWTGATKYHLNGGDSLVNPGPAMASHKDDEEKFFPMHGTLI |
| | FGKEGTNATNAELENVMITDEEEIRTTNPVATEQYGYVSNNLQNSNTAASTETVNHQGAL |
| | PGMVWQDRDVYLRGPIWAKIPHADGHFHPSPLMGGFGLKHPPPQIMIKNTPVPANPPTNF |
| | SSAKFASFITQYSTGQVSVEIEWELQKENSKRWNPEIQYTSNYNKSVNVDFTVDTNGVYS |
| | EPRPIGTRYLTRNL |
| 1456 | MAPGKKRPVEHSPVEPDSSSGTGKAGQQPARKRLNFGQTGDAD |
| | SVPDPQPLGQPPAAPSGLGTNTMATGSGAPMADNNEGADGVGNSSGSWHCDSTWMGDRVI |
| | TTSTRTWALPTYNNHLYKQISSQSGASNDNHYFGYSTPWGYFDFNRFHCHFSPRDWQRLI |
| | NNNWGFRPKRLNFKLFNIQVKEVTQNDGTTTIANNLTSTVQVFTDSEYQLPYVPGSAHQG |
| | CLPPFPADVFMVPQYGYLTLNNGSQAVGRSSFYCLEYFPSQMLRTGNNFTFSYTFEDVPF |
| | HSSYAHSQSLDRLMNPLIDQYLYYLSRTNTPSGTTTQSRLQFSQAGASDIRDQSRNWLPG |
| | PCYRQQRVSKTAADNNNSEYSWTGATKYHLNGRDSLVNPGPAMASHKDDEEKFFPQSGVL |
| | IFGKQGSEKTNVDIEKVMITDEEEIRTTNPVATEQYGSVSTNLQSGNTQAATADVNTQGV |
| | LPGMVWQDRDVHLQGPIWAKIPHTDGHFHPSPLMGGFGLKHPPPQILIKNTPVPANPSTT |
| | FSAAKFASFITQYSTGQVSVEIEWELQKENSKRWNPEIQYTSNYNKSVNVDFTVDTNGVY |
| | SEPRPIGTRYLTRNL |
| 1457 | MAPGKKRPVEHSPVEPDSSSGTGKAGQQPARKRLNFGQTGDAD |
| | SVPDPQPLGQPPAAPSGLGTNTMATGSGAPMADNNEGADGVGNSSGNWHCDSTWMGDRVI |
| | TTSTRTWALPTYNNHLYKQISSQSGASNDNHYFGYSTPWGYFDFNRFHCHFSPRDWQRLI |
| | NNNWGFRPKRLNFKLFNIQVKEVTQNDGTTTIANNLTSTVQVFTDSEYQLPYVLGSAHQG |
| | CLPPFPADVFMVPQYGYLTLNNGSQAVGRSSFYCLEYFPSQMLRTGNNFTFSYTFEDVPF |
| | HSGYAHSQSLDRLMNPLIDQYLYYLSTTNTPSGTTTQSRLQFSQAGASDIRDQSRNWLPG |
| | PCYRQQRVSKTSADNNNSEYSWTGATKYHLNGRDSLVNPGPAMASHKDNEEKFFPQSGVL |
| | IFGKQGSEKTNVDIEKVMITDEEEIRTTNPVATEQYGSVSTNLQRGNRQAATADVNTQGV |
| | LPGMVWQDRDVYLQGPIWAKIPHTDGHFHPSPLMGGFGLKHPPPQILIKNTPVPANPSTT |
| | FSAAKFASFITQYSTGQVSVEIEWELQKENSKRWNPEIQYTSNYNKSVNVDFTVDTNGVY |
| | SEPRPIGTRYLTRNL |
| 1458 | MAPGKKRPVEHSPVEPDSSSGTGKAGQQPARKRLNFGQTGDAD |
| | SVPDPQPLGQPPAAPSGLGTNTMATGSGAPMADNNEGADGVGNSSGNRHCDSTWMGDRVI |
| | TTSTRTWALPTYNNHLYRQISSQSGASNDNHYFGYSTPWGYFDFNRFHCHFSPRDWQRLI |
| | NNNWGFRPKRLNFKLFNIQVKEVTQNDGTTTIANNLTSTVQVFTDSEYQLPYVLGSAHQG |
| | CLPPFPADVFMVPQYGYLTLSNGSQAVGRSSFYCPEYFPSQMLRTGNNFTFSYTFEDVPF |
| | HSSYAHSQSLDRLMNPLIDQYLYYLSTTNTPSGTTTQSRLQFSQAGASDIRDQSRNWLPG |
| | PCYRQQRVSKTSADNNNSEYSWTGATKYHLNGRDSLVNPGPAMASHKDNEEKFFPQSGVL |
| | IFGKQGSEKTNVDIEKVMITDEEEIRTTNPVATEQYGSVSTNLQRGNRQAATADVNTQGV |
| | LPGMVWQDRDVYLQGPIWAKIPHTDGHFHPSPLMGGFGPKHPPPQILIKNTPVPANPSTT |
| | FSAAKFASFITQYSTGQVSVEIEWELQKENSKRWNPEIQYTSNYNKSVNVDFTVDINGVY |
| | SEPRPIGTRYLTRNL |
| 1459 | MAPGKKRPVEHSPVEPDSSSGTGKAGNQPARKRLNFGQTGDAD |
| | SVPDPQPLGQPPASPSGLGTNTMATGSGAPMADNNEGADGVGNSSGNWHCDSTWMGDRVV |
| | TTSTRTWALPTYNNHLYKQISSQSGASNDNHYFGYSTPWGYFDFNRFHCHFSPRDWQRLI |
| | NNNWGFRPKRLNFKLFNIQVKEVTQNDGTTTIANNLTSTVQVFTDLEYQLPYVLGSAHQG |
| | CLPPFPADVFMVPQYGYLTLNNGSQAVGRSSFYCLEYFPSQMLRTGNNFTFSYTFEDVPF |
| | HSSYAHSQSLDRLMNPLIDQYLYYLSRTNTPSGTTTQSRLQFSQAGASDIRDQSRNWLPG |
| | PCYRQQRVSKTAADNNNSEYSWTGATKYHLNGRDSLVNPGPAMASHKDDEEKFFPQSGVL |
| | IFGKQGSEKTNVDIEKVMITDEEEIRTTNPVATEQYGSVSTNLQSGNTQAATSDVNTQGV |
| | LPGMVWQDRDVYLQGPIWAKIPHTDGHFHPSPLMGGFGLKHPPPQILIKNTPVPANPSTT |
| | FSAAKFASFITQYSTGQVSVEIEWELQKENSKRWNPEIQYTSNYNKSVNVDFTVDINGVY |
| | SEPRPIGTRYLTRNL |
| 1460 | MAPGKKRPVEHSPVEPDSSSGTGKAGNQPARKRLNFGQTGDADS |
| | VPDPQPLGQPPAAPSGLGTNTMATGSGAPMADNNEGADGVGNSSGDWHCDSTWMGDRVIT |
| | TSTRTWALPTYNNHLYKQISSQSGASNDNHYFGYSTPWGYFDFNRFHCHFSPRDWQRLIN |
| | NNWGFRPKRLNLKLFNIQVKEVTQNDGTTTIANNLTSTVQVFTDLEYQLPYVLGSAHQGC |
| | LPPFPADVFMVPQYGYLTLNNGSQAVGRSSFYCLEYFPSQMLRTGNNFTFSYTFEDVPFH |
| | SSYAHSQSLDRLMNPLIDQYLYYLSRTNTPSGTTTQSRLQFSQAGASDIRDQSRNWLPGP |
| | CYRQQRVSKTAADNNNGEYSWTGATKYHLNGRDSLVNPGPAMASHKDDEEKFFPQSGVLI |
| | FGKQGSEKTNVDIEKVMITDEEEIRTTNPVATEQYGSVSTNLQSGNTRAATSDVNTQGVL |
| | PGMVWQDRDVYLQGPIWAKIPHTDGHFHPSPLMGGFGLKHPPPQILIKNTPVPANPSTTF |
| | SAAKFASFITQYSTGQVSVEIEWELQKENSKRWNPEIQYTSNYNKSVNVDFTVDTNGVYS |
| | EPRPIGTRYLTRNL |
| 1461 | MAPGKKRPVEHSPVEPDSSSGTGKAGNQPARKRLNFGQTGDAD |
| | SVPDPQPLGQPPAAPSGLGTNTMATGSGAPMADNNDGADGVGNSSGNWHCDSTWMGDRVI |
| | TTSTRTWALPTYNNHLYKQISSQSGASNDNHYFGYSTPWGYFDFNRFHCHFSPRDWQRLI |
| | NNNWGFRPKRLNFKLFNIQVREVTQNDGTTTIANNLTSTVQVFTDSEYQLPYVLGSAHQG |
| | CLPPFPADVFMVPQYGYLTLNNGSQAVGRSSFYCLEYFPSQMLRTGNNFTFSYTFEDVPF |
| | HSSYAHSQSLDRLMNPLIDQYLYYLSRTNTPSGTTTQSRLQFSQAGASDIRDQSRNWLPG |
| | PCYRQQRVSKTSADNNNSEYSWIGATKYHLNGRDSLVNPGPAMASHKDDEEKFFPQSGVL |
| | IFGKQGSEKTNVDIEKVMITDEEEIRTTNPVATEQYGSVSTNLQSGNTQASTADVNTQGV |
| | LPGMVWQDRDVYLQGPIWAKIPHTDGHFHPSPLMGGFGLKHPPPQILIKNTPVPANPSTT |
| | FSAAKFASFITQYSTGRVSVEIEWELQKENSKRWNPEIQYTSNYNKSVNVDFTVDINGVY |
| | SEPRPIGTRYLTRNL |
| 1462 | MAPGKKRPVEHSPAEPDSSSGTGKAGQQPARKRLNFGQTGDAD |
| | SVPDPQPLGQPPAAPSGLGTNTMATGSGAPMADNNEGADGVGNSSGNWHCDSTWMGDRVI |
| | TTSTRTWALPTYNNHLYKQISSQSGASNDNHYFGYSTPWGYFDFNRFHCHFSPRDWQRLI |
| | NNNWGFRPKRLNFKLFNIQVKEVTQNDGTTTIANNLTSTVQVFTDSEYQLPYVLGSAHQG |
| | CLPPFPADVFMVPQYGYLTLNNGSQAVGRSSFYCLEYFPSQMLRTGNNFTFSYTFEDVPF |
| | HSSYAHSQSLDRLMNPLIDQYLYYLSRTNTPSGTTTQSRLQFSQAGASDIRDQSRNWLPG |
| | PCYRQQRVSKTSADNNNSEYSWTGATKYHLNGRDSLVNPGPAMASHKDDEEKFFPQSGVL |
| | IFGKQDSGKTNVDIEKVMITDEEEIRTTNPVATEQYGSVSTNLQSGNTQAATSDVNTQGV |
| | LPGMVWQDRDVYLQGPIWAKIPHTDGHFHPSPLMGGFGLKHPPPQILIKNTPVPANPSTT |
| | FSAAKFASFITQYSTGQVSVEIEWELQKENSKRWNPEIQYTSNYNKSVNVDFTVDINGVY |
| | SEPRPIGTRYLTRNL |
| 1463 | MAPGKKRPVEHSLAEPDSSSGTGKAGQQPARRRLNFGQTGDAD |
| | SVPDPQPLGQPPAAPSGLGTNTMATGSGAPMADNNEGADGVGNSSGNWHCDSTWMGDRVI |
| | TTSTRTWALPTYNNHLYRQISSQSGASNDNHYFGYSTPWGYFDFNRFHCHFSPRDWQRLI |
| | NNNWGSRPKRLNFKLFNIQVKEVTQNDGTTTIANNLTSTVQVFTDSEYQLPYVLGSAHQG |
| | CLPPFPADVFMVPQYGYLTLNNGSQAVGRSSFYCLEYFPSQMLRTGNNFTFSYTFEDVPF |
| | HSSYAHSQSLDRLMNPLVDQYLYYLSRTNTPSGTTTQSRLQFSQAGASDIRDQSRNWLPG |
| | PCYRQQRVSKTSADNNNSEYSWTGATKYHLNGRDSLVNPGPAMASHKDDEEKFFPQSGVL |
| | IFGKQDSGKTNVDIEKVMITDEEEIRTTNPVATEQYGSVSTNLQSGNTQAATSDVNTQGV |
| | LPGMVWQDRDVYLQGPIWAKIPHTDGHFHPSPLMGGFGLKHPPPQILIKNTPVPANPSTT |
| | FSAAKFASFITQYSTGQVSVEIEWELQKENSKRWNPEIQYTSNYNKSVNVDFTVDTNGVY |
| | SEPRPIGTRYLTRNL |
| 1464 | MAPGKKRPVEPSPQRSPDSSAGIGKKGQQPAKKRLNFGQTGDS |
| | ESVPDPQPIGEPPAGPSGLGSGTMAAGGGAPMADNNEGADGVGSSSGNWHCDSTWLGDRV |
| | ITTSTRTWALPTYNNHLYKQISNGTSGGSTNDNTYFGYSTPWGYFDFNRFHCHFSPRDWQ |
| | RLINNNWGFRPKRLSFKLFNIQVKEVTQNEGTETIANNLTSTIQVFTDSEYQLPYVLGSA |
| | HQGCLPPFPADVFMIPQYGYLTLNNGSQAVGRSSFYCLEYFPSQMLRTGNNFEFSYTFED |
| | VPFHSSCAHSQSSDRLMNPLIDQYLYYLSRTRSTGGTQGTQQLLFSQAGPANMSAQAKNW |
| | LPGPCYRQQRVSTTLSQNNNSNFAWTGATKYHLNGRDSLVNPGVAMATHKDDEERFFPSS |
| | GVLMFGKQGAGRDNVDYSSVMLTSEEEIKTTNPVATEQYGVVADNLQQTNTGPIVGNVNS |
| | QGALPGMVWQNRDVYLQGPIWAKIPHTDGNFHPSPLMGGFGLKHPPPQILIKNTPVPADP |
| | PTTFSQAKLASFITQYSTGQVSVEIEWELQKENSKRWNPEIQYTSNYYKSTNVDFAVNTE |
| | GTYSEPRPIGTRYLTRNL |
| 1465 | MAPGKKRPVEPSPQRSPDSSTGIGKKGQQPAKKRLNFGQTGDS |
| | ESVPDPQPIGEPPAGPSGLGSGTMAAGGGAPMADNNEGADGVGSSSGNWHCDSTWLGDRV |
| | ITTSTRTWALPTYNNHLYKQISNGTSGGSTNDNTYFGYSTPWGYFDFNRFHCHFSPRDWQ |
| | RLINNNWGFRPKRLSFKLFNIQVKEVTQNEGTKTIANNLTSTIQVFTDSEYQLPYVLGSA |
| | HQGCLPPFPADVFMIPQYGYLTLNNGSQAVGRSSFYCLEYFPSQMLRTGNNFEFSYTFED |
| | VPFHSGYAHSQSLDRLMNPLIDQYLYYLSRTQSTGGTQGTQQLLFSQAGPANMSAQAKNW |
| | LPGPCYRQQRVSTTLSQNNNSNFAWTGATKYHLNGRDSLVNPGVAMATHKDDEERFFPSS |
| | GVLMFGKQGAGRDNVDYSSVMLTSEEEIKTTNPVATEQYGVVADNLQQTNTGPIVGNVNS |
| | QGALPGMVWQNRDVYLQGPIWAKIPHTDGNFHPSPLMGGFGLKHPPPQILIKNTPVPADP |
| | PTTFSQAKLASFITQYSTGQVSVEIEWELQKENSKRWNPEIQYTSNYYKSTNVDFAVNTE |
| | GTYSEPRPIGTRYLTRNL |

TABLE 7
VP3 capsid proteins

| SEQ | |
|---|---|
| ID | |
| NO.: | VP3 Capsid Protein Sequence |
| 1466 | MASGGGAPVADNNEGADGVGSSSGNWHCDSQWLGDRVITTSTRTWALPTYNNHLYKQISN |
| | STSGGSSNDNAYFGYSTPWGYFDFNRFHCHFSPRDWQRLINNNWGFRPKRLNFKLFNIQV |
| | KEVTDNNGVKTIANNLTSTVQVFTDSDYQLPYVLGSAHEGCLPPFPADVFMIPQYGYLTL |
| | NDGSQAVGRSSFYCLEYFPSQMLRTGNNFQFSYEFENVPFHSSYAHSQSLDRLMNPLIDQ |
| | YLYYLSKTINGSGQNQQTLKFSVAGPSNMAVQGRNYIPGPSYRQQRVSTTVTQNNNSEFA |
| | WPGASSWALNGRNSLMNPGPAMASHKEGEDRFFPLSGSLIFGKQGTGRDNVDADKVMITN |
| | EEEIKTTNPVATESYGQVATNHQGQSGRGDLGLSAQAAQTGWVQNQGILPGMVWQDRDVY |
| | LQGPIWAKIPHTDGNFHPSPLMGGFGMKHPPPQILIKNTPVPADPPTAFNKDKLNSFITQ |
| | YSTGQVSVEIEWELQKENSKRWNPEIQYTSNYYKSNNVEFAVNTEGVYSEPRPIGTRYLT |
| | RNLEFAVNTEGVYSEPRPIGTRYLTRNL |
| 1467 | MASGGGAPVADNNEGADGVGSSSGNWHCDSQWLGDRVITTSTRTWALPTYNNHLYKQISN |
| | STSGGSSNDNAYFGYSTPWGYFDFNRFHCHFSPRDWQRLINNNWGFRPKRLNFKLFNIQV |
| | KEVTDNNGVKTIANNLTSTVQVFTDSDYQLPYVLGSAHEGCLPPFPADVFMIPQYGYLTL |
| | NDGSQAVGRSSFYCLEYFPSQMLRTGNNFQFSYEFENVPFHSSYAHSQSLDRLMNPLIDQ |
| | YLYYLSKTINGSGQNQQTLKFSVAGPSNMAVQGRNYIPGPSYRQQRVSTTVTQNNNSEFA |
| | WAAASSWALNGRNSLMNPGPAMASHKEGEDRFFPLSGSLIFGKQGTGRDNVDADKVMITN |
| | EEEIKTTNPVATESYGQVATNHQGQSGRGDLGLSAQAAQTGWVQNQGILPGMVWQDRDVY |
| | LQGPIWAKIPHTDGNFHPSPLMGGFGMKHPPPQILIKNTPVPADPPTAFNKDKLNSFITQ |
| | YSTGQVSVEIEWELQKENSKRWNPEIQYTSNYYKSNNVEFAVNTEGVYSEPRPIGTRYLT |
| | RNL |
| 1468 | MASGGGAPVADNNEGADGVGSSSGNWHCDSQWLGDRVITTSTRTWALPTYNNHLYKQISN |
| | STSGGSSNDNAYFGYSTPWGYFDFNRFHCHFSPRDWQRLINNNWGFRPKRLNFKLFNIQV |
| | KEVTDNNGVKTIANNLTSTVQVFTDSDYQLPYVLGSAHEGCLPPFPADVFMIPQYGYLTL |
| | NDGSQAVGRSSFYCLEYFPSQMLRTGNNFQFSYEFENVPFHSSYAHSQSLDRLMNPLIDQ |
| | YLYYLSKTINGSGQNQQTLKFSVAGPSNMAVQGRNYIPGPSYRQQRVSTTVTQNNNSEFA |
| | WPGASSWALNGRNSLMNPGPAMASHKEGEDRFFPLSGSLIFGKQGTGRDNVDADKVMITN |
| | EEEIKTTNPVATESYGQVATNHQSGQSGRGDLGLSAQAATGWVQNQGILPGMVWQDRDVY |
| | LQGPIWAKIPHTDGNFHPSPLMGGFGMKHPPPQILIKNTPVPADPPTAFNKDKLNSFITQ |
| | YSTGQVSVEIEWELQKENSKRWNPEIQYTSNYYKSNNVEFAVNTEGVYSEPRPIGTRYLT |
| | RNL |
| 1469 | MASGGGAPVADNNEGADGVGSSSGNWHCDSQWLGDRVITTSTRTWALPTYNNHLYKQISN |
| | STSGGSSNDNAYFGYSTPWGYFDFNRFHCHFSPRDWQRLINNNWGFRPKRLNFKLFNIQV |
| | KEVTDNNGVKTIANNLTSTVQVFTDSDYQLPYVLGSAHEGCLPPFPADVFMIPQYGYLTL |
| | NDGSQAVGRSSFYCLEYFPSQMLRTGNNFQFSYEFENVPFHSSYAHSQSLDRLMNPLIDQ |
| | YLYYLSKTINGSGQNQQTLKFSVAGPSNMAVQGRNYIPGPSYRQQRVSTTVTQNNNSEFA |
| | WPGASSWALNGRNSLMNPGPAMASHKEGEDRFFPLSGSLIFGKQGTGRDNVDADKVMITN |
| | EEEIKTTNPVATESYGQVATNHQGQSGRGDAVGVAQAAQTGWVQNQGILPGMVWQDRDVY |
| | LQGPIWAKIPHTDGNFHPSPLMGGFGMKHPPPQILIKNTPVPADPPTAFNKDKLNSFITQ |
| | YSTGQVSVEIEWELQKENSKRWNPEIQYTSNYYKSNNVEFAVNTEGVYSEPRPIGTRYLT |
| | RNL |
| 1470 | MASGGGAPVADNNEGADGVGSSSGNWHCDSQWLGDRVITTSTRTWALPTYNNHLYKQISN |
| | STSGGSSNDNAYFGYSTPWGYFDFNRFHCHFSPRDWQRLINNNWGFRPKRLNFKLFNIQV |
| | KEVTDNNGVKTIANNLTSTVQVFTDSDYQLPYVLGSAHEGCLPPFPADVFMIPQYGYLTL |
| | NDGSQAVGRSSFYCLEYFPSQMLRTGNNFQFSYEFENVPFHSSYAHSQSLDRLMNPLIDQ |
| | YLYYLSKTINGSGQNQQTLKFSVAGPSNMAVQGRNYIPGPSYRQQRVSTTVTQNNNSEFA |
| | WPGASSWALNGRNSLMNPGPAMASHKEGEDRFFPLSGSLIFGKQGTGRDNVDADKVMITN |
| | EEEIKTTNPVATESYGQVATNHQSGQSGRGDAVGVAQAATGWVQNQGILPGMVWQDRDVY |
| | LQGPIWAKIPHTDGNFHPSPLMGGFGMKHPPPQILIKNTPVPADPPTAFNKDKLNSFITQ |
| | YSTGQVSVEIEWELQKENSKRWNPEIQYTSNYYKSNNVEFAVNTEGVYSEPRPIGTRYLT |
| | RNL |
| 1471 | MASGGGAPVADNNEGADGVGSSSGNWHCDSQWLGDRVITTSTRTWALPTYNNHLYKQISN |
| | STSGGSSNDNAYFGYSTPWGYFDFNRFHCHFSPRDWQRLINNNWGFRPKRLNFKLFNIQV |
| | KEVTDNNGVKTIANNLTSTVQVFTDSDYQLPYVLGSAHEGCLPPFPADVFMIPQYGYLTL |
| | NDGSQAVGRSSFYCLEYFPSQMLRTGNNFQFSYEFENVPFHSSYAHSQSLDRLMNPLIDQ |
| | YLYYLSKTINGSGQNQQTLKFSVAGPSNMAVQGRNYIPGPSYRQQRVSTTVTQNNNSEFA |
| | WAAASSWALNGRNSLMNPGPAMASHKEGEDRFFPLSGSLIFGKQGTGRDNVDADKVMITN |
| | EEEIKTTNPVATESYGQVATNHQSGQSGRGDLGLSAQAATGWVQNQGILPGMVWQDRDVY |
| | LQGPIWAKIPHTDGNFHPSPLMGGFGMKHPPPQILIKNTPVPADPPTAFNKDKLNSFITQ |
| | YSTGQVSVEIEWELQKENSKRWNPEIQYTSNYYKSNNVEFAVNTEGVYSEPRPIGTRYLT |
| | RNL |
| 1472 | MASGGGAPVADNNEGADGVGSSSGNWHCDSQWLGDRVITTSTRTWALPTYNNHLYKQISN |
| | STSGGSSNDNAYFGYSTPWGYFDFNRFHCHFSPRDWQRLINNNWGFRPKRLNFKLFNIQV |
| | KEVTDNNGVKTIANNLTSTVQVFTDSDYQLPYVLGSAHEGCLPPFPADVFMIPQYGYLTL |
| | NDGSQAVGRSSFYCLEYFPSQMLRTGNNFQFSYEFENVPFHSSYAHSQSLDRLMNPLIDQ |
| | YLYYLSKTINGSGQNQQTLKFSVAGPSNMAVQGRNYIPGPSYRQQRVSTTVTQNNNSEFA |
| | WAAASSWALNGRNSLMNPGPAMASHKEGEDRFFPLSGSLIFGKQGTGRDNVDADKVMITN |
| | EEEIKTTNPVATESYGQVATNHQGQSGRGDAVGVAQAAQTGWVQNQGILPGMVWQDRDVY |
| | LQGPIWAKIPHTDGNFHPSPLMGGFGMKHPPPQILIKNTPVPADPPTAFNKDKLNSFITQ |
| | YSTGQVSVEIEWELQKENSKRWNPEIQYTSNYYKSNNVEFAVNTEGVYSEPRPIGTRYLT |
| | RNL |
| 1473 | MASGGGAPVADNNEGADGVGSSSGNWHCDSQWLGDRVITTSTRTWALPTYNNHLYKQISN |
| | STSGGSSNDNAYFGYSTPWGYFDFNRFHCHFSPRDWQRLINNNWGFRPKRLNFKLFNIQV |
| | KEVTDNNGVKTIANNLTSTVQVFTDSDYQLPYVLGSAHEGCLPPFPADVFMIPQYGYLTL |
| | NDGSQAVGRSSFYCLEYFPSQMLRTGNNFQFSYEFENVPFHSSYAHSQSLDRLMNPLIDQ |
| | YLYYLSKTINGSGQNQQTLKFSVAGPSNMAVQGRNYIPGPSYRQQRVSTTVTQNNNSEFA |
| | WAAASSWALNGRNSLMNPGPAMASHKEGEDRFFPLSGSLIFGKQGTGRDNVDADKVMITN |
| | EEEIKTTNPVATESYGQVATNHQSGQSGRGDAVGVAQAATGWVQNQGILPGMVWQDRDVY |
| | LQGPIWAKIPHTDGNFHPSPLMGGFGMKHPPPQILIKNTPVPADPPTAFNKDKLNSFITQ |
| | YSTGQVSVEIEWELQKENSKRWNPEIQYTSNYYKSNNVEFAVNTEGVYSEPRPIGTRYLT |
| | RNL |
| 1474 | MASGGGAPVADNNEGADGVGNASGNWHCDSQWLGDRVITTSTRTWALPTYNNHLYKQISS |
| | ASTGATNDNTYFGYSTPWGYFDFNRFHCHFSPRDWQRLINNNWGFRPKRLNFKLFNIQVK |
| | EVTDNNGVKTIANNLTSTVQVFTDSDYQLPYVLGSAHEGCLPPFPADVFMIPQYGYLTLN |
| | DGSQAVGRSSFYCLEYFPSQMLRTGNNFQFSYEFENVPFHSSYAHSQSLDRLMNPLIDQY |
| | LYYLSKTINGSGQNQQTLKFSVAGPSNMAVQGRNYIPGPSYRQQRVSTTVTQNNNSEFAW |
| | PGASSWALNGRNSLMNPGPAMASHKEGEDRFFPLSGSLIFGKQGTGRDNVDADKVMITNE |
| | EEIKTTNPVATESYGQVATNHQGQSGRGDLGLSAQAAQTGWVQNQGILPGMVWQDRDVYL |
| | QGPIWAKIPHTDGNFHPSPLMGGFGMKHPPPQILIKNTPVPADPPTAFNKDKLNSFITQY |
| | STGQVSVEIEWELQKENSKRWNPEIQYTSNYYKSNNVEFAVNTEGVYSEPRPIGTRYLTR |
| | NL |
| 1475 | MASGGGAPMADNNEGADGVGNASGNWHCDSTWLGDRVITTSTRTWALPTYNNHLYKQISN |
| | GTSGGATNDNTYFGYSTPWGYFDFNRFHCHFSPRDWQRLINNNWGFRPKRLNFKLFNIQV |
| | KEVTDNNGVKTIANNLTSTVQVFTDSDYQLPYVLGSAHEGCLPPFPADVFMIPQYGYLTL |
| | NDGSQAVGRSSFYCLEYFPSQMLRTGNNFQFSYEFENVPFHSSYAHSQSLDRLMNPLIDQ |
| | YLYYLSKTINGSGQNQQTLKFSVAGPSNMAVQGRNYIPGPSYRQQRVSTTVTQNNNSEFA |
| | WPGASSWALNGRNSLMNPGPAMASHKEGEDRFFPLSGSLIFGKQGTGRDNVDADKVMITN |
| | EEEIKTTNPVATESYGQVATNHQGQSGRGDLGLSAQAAQTGWVQNQGILPGMVWQDRDVY |
| | LQGPIWAKIPHTDGNFHPSPLMGGFGMKHPPPQILIKNTPVPADPPTAFNKDKLNSFITQ |
| | YSTGQVSVEIEWELQKENSKRWNPEIQYTSNYYKSNNVEFAVNTEGVYSEPRPIGTRYLT |
| | RNL |
| 1476 | MASGGGAPMADNNEGADGVGNASGNWHCDSTWLGDRVITTSTRTWALPTYNNHLYKQISN |
| | GTSGGATNDNAYFGYSTPWGYFDFNRFHCHFSPRDWQRLINNNWGFRPKRLNFKLFNIQV |
| | KEVTDNNGVKTIANNLTSTVQVFTDSDYQLPYVLGSAHEGCLPPFPADVFMIPQYGYLTL |
| | NDGSQAVGRSSFYCLEYFPSQMLRTGNNFQFSYEFENVPFHSSYAHSQSLDRLMNPLIDQ |
| | YLYYLSKTINGSGQNQQTLKFSVAGPSNMAVQGRNYIPGPSYRQQRVSTTVTQNNNSEFA |
| | WPGASSWALNGRNSLMNPGPAMASHKEGEDRFFPLSGSLIFGKQGTGRDNVDADKVMITN |
| | EEEIKTTNPVATESYGQVATNHQGQSGRGDLGLSAQAAQTGWVQNQGILPGMVWQDRDVY |
| | LQGPIWAKIPHTDGNFHPSPLMGGFGMKHPPPQILIKNTPVPADPPTAFNKDKLNSFITQ |
| | YSTGQVSVEIEWELQKENSKRWNPEIQYTSNYYKSNNVEFAVNTEGVYSEPRPIGTRYLT |
| | RNL |
| 1477 | MASGGGAPVADNNEGADGVGSSSGNWHCDSQWLGDRVITTSTRTWALPTYNNHLYKQISN |
| | STSGGSSNDNAYFGYSTPWGYFDFNRFHCHFSPRDWQRLINNNWGFRPKRLNFKLFNIQV |
| | KEVTDNNGVKTIANNLTSTVQVFTDSDYQLPYVLGSAHEGCLPPFPADVFMIPQYGYLTL |
| | NDGSQAVGRSSFYCLEYFPSQMLRTGNNFQFSYEFENVPFHSSYAHSQSLDRLMNPLIDQ |
| | YLYYLSKTINGSGQNQQTLKFSVAGPSNMAVQGRNYIPGPSYRQQRVSTTVTQNNNSEFA |
| | WPGASSWALNGRNSLMNPGPAMASHKEGEDRFFPLSGSLIFGKQGTGRDNVDADKVMITN |
| | EEEIKTTNPVATESYGQVATNHQGQSGRGDLGLSAQAAQTGWVQNQGILPGMVWQDRDVY |
| | LQGPIWAKIPHTDGNFHPSPLMGGFGLKHPPPQILIKNTPVPADPPAEFSATKFASFITQ |
| | YSTGQVSVEIEWELQKENSKRWNPEVQYTSNYAKSANVDFTVDNNGLYTEPRPIGTRYLT |
| | RPL |
| 1478 | MASGGGAPVADNNEGADGVGSSSGNWHCDSQWLGDRVITTSTRTWALPTYNNHLYKQISN |
| | STSGGSSNDNAYFGYSTPWGYFDFNRFHCHFSPRDWQRLINNNWGFRPKRLNFKLFNIQV |
| | KEVTDNNGVKTIANNLTSTVQVFTDSDYQLPYVLGSAHEGCLPPFPADVFMIPQYGYLTL |
| | NDGSQAVGRSSFYCLEYFPSQMLRTGNNFQFSYEFENVPFHSSYAHSQSLDRLMNPLIDQ |
| | YLYYLSKTINGSGQNQQTLKFSVAGPSNMAVQGRNYIPGPSYRQQRVSTTVTQNNNSEFA |
| | WPGASSWALNGRNSLMNPGPAMASHKEGEDRFFPLSGSLIFGKQGTGRDNVDADKVMITN |
| | EEEIKTTNPVATESYGQVATNHQSNSRGDYNSLAQAQTGWVQNQGILPGMVWQDRDVYLQ |
| | GPIWAKIPHTDGNFHPSPLMGGFGMKHPPPQILIKNTPVPADPPTAFNKDKLNSFITQYS |
| | TGQVSVEIEWELQKENSKRWNPEIQYTSNYYKSNNVEFAVNTEGVYSEPRPIGTRYLTRN |
| | L |
| 1479 | MASGGGAPVADNNEGADGVGSSSGNWHCDSQWLGDRVITTSTRTWALPTYNNHLYKQISN |
| | STSGGSSNDNAYFGYSTPWGYFDFNRFHCHFSPRDWQRLINNNWGFRPKRLNFKLFNIQV |
| | KEVTDNNGVKTIANNLTSTVQVFTDSDYQLPYVLGSAHEGCLPPFPADVFMIPQYGYLTL |
| | NDGSQAVGRSSFYCLEYFPSQMLRTGNNFQFSYEFENVPFHSSYAHSQSLDRLMNPLIDQ |
| | YLYYLSKTINGSGQNQQTLKFSVAGPSNMAVQGRNYIPGPSYRQQRVSTTVTQNNNSEFA |
| | WPGASSWALNGRNSLMNPGPAMASHKEGEDRFFPLSGSLIFGKQGTGRDNVDADKVMITN |
| | EEEIKTTNPVATESYGQVATNHQSNSRGDYNSLAQAQTGWVQNQGILPGMVWQDRDVYLQ |
| | GPIWAKIPHTDGNFHPSPLMGGFGMKHPPPQILIKNTPVPADPPTAFNKDKLNSFITQYS |
| | TGQVSVEIEWELQKENSKRWNPEIQYTSNYYKSNNVEFAVNTEGVYSEPRPIGTRYLTRN |
| | L |
| 1480 | MASGGGAPVADNNEGADGVGSSSGNWHCDSQWLGDRVITTSTRTWALPTYNNHLYKQISN |
| | STSGGSSNDNAYFGYSTPWGYFDFNRFHCHFSPRDWQRLINNNWGFRPKRLNFKLFNIQV |
| | KEVTDNNGVKTIANNLTSTVQVFTDSDYQLPYVLGSAHEGCLPPFPADVFMIPQYGYLTL |
| | NDGSQAVGRSSFYCLEYFPSQMLRTGNNFQFSYEFENVPFHSSYAHSQSLDRLMNPLIDQ |
| | YLYYLSKTINGSGQNQQTLKFSVAGPSNMAVQGRNYIPGPSYRQQRVSTTVTQNNNSEFA |
| | WPGASSWALNGRNSLMNPGPAMASHKEGEDRFFPLSGSLIFGKQGTGRDNVDADKVMITN |
| | EEEIKTTNPVATESYGQVATNHQSAQAQAQTGWVQNQGILPGMVWQDRDVYLQGPIWAKI |
| | PHTDGNFHPSPLMGGFGMKHPPPQILIKNTPVPADPPTAFNKDKLNSFITQYSTGQVSVE |
| | IEWELQKENSKRWNPEIQYTSNYYKSNNVEFAVNTEGVYSEPRPIGTRYLTRNL |
| 1481 | MASGSGAPMADNNEGADGVGNSSGNWHCDSTWMGDRVI |
| | TTSTRTWALPTYNNHLYKQISSQSGASNDNHYFGYSTPWGYFDFNRFHCHFSPRDWQRLI |
| | NNNWGFRPKRLNFKLFNIQVKEVTQNDGTTTIANNLTSTVQVFTDSEYQLPYVLGSAHQG |
| | CLPPFPADVFMVPQYGYLTLNNGSQAVGRSSFYCLEYFPSQMLRTGNNFTFSYTFEDVPF |
| | HSSYAHSQSLDRLMNPLIDQYLYYLSRTNTPSGTTTQSRLQFSQAGASDIRDQSRNWLPG |
| | PCYRQQRVSKTSADNNNSEYSWTGATKYHLNGRDSLVNPGPAMASHKDDEEKFFPQSGVL |
| | IFGKQGSEKTNVDIEKVMITDEEEIRTTNPVATEQYGSVSTNLQGGNTQAATADVNTQGV |
| | LPGMVWQDRDVYLQGPIWAKIPHTDGHFHPSPLMGGFGLKHPPPQILIKNTPVPANPSTT |
| | FSAAKFASFITQYSTGQVSVEIEWELQKENSKRWNPEIQYTSNYNKSVNVDFTVDTNGVY |
| | SEPRPIGTRYLTRNL |
| 1482 | MASGSGAPMADNNEGADGVGNSSGNWYCDSTWMGDRVITTSTRTWALPTYNNHLYKQISS |
| | QSGASNDNHYFGYSTPWGYFDFNRFHCHFSPRDWQRLINNNWGFRPKRLSFKLFNIQVKE |
| | VTQNDGTTTIANNLTSTVQVFTDSEYQLPYVLGSAHQGCLPPFPADVFMVPQYGYLTLNN |
| | GSQAVGRSSFYCLEYFPSQMLRTGNNFTFSYTFEDVPFHSSYAHSQSLDRLMNPLIDQYL |
| | YYLSRTNTPSGTTTMSRLQFSQAGASDIRDQSRNWLPGPCYRQQRVSKTAADNNNSDYSW |
| | TGATKYHLNGRDSLVNPGPAMASHKDDEEKYFPQSGVLIFGKQDSGKTNVDIEKVMITDE |
| | EEIRTTNPVATEQYGSVSTNLQSGNTQAATSDVNTQGVLPGMVWQDRDVYLQGPIWAKIP |
| | HTDGHFHPSPLVGGFGLKHPPPQILIKNTPVPANPSTTFSAAKFASFITQYSTGQVSVEI |
| | EWELQKENSKRWNPEIQYTSNYNKSVNVDFTVDTNGVYSEPRPIGTRYLTRNL |
| 1483 | MASGSGAPMADNNEGADGVGNSSGNWHCDSTWMGDRVITTSTRTWALPTYNNHLYKQISS |
| | QSGASNDNHYFGYSTPWGHFDFNRFHCHFSPRDWQRLINNNWGFRPKRLSFKLFNIQVKE |
| | VTQNDGTTTIANNLTSTVQVFTDSEYQLPYVLGSAHQGCLPPFPADVFMVPQYGYLTLNN |
| | GSQAVGRSSFYCLEYFPSQMLRTGNNFTFSYTFEDVPFHSSYAHSQSLDRLMNPLIDQYL |
| | YYLSRTNTPSGTTTMSRLQFSQAGASDIRDQSRNWLPGPCYRQQRVSKTAADNNNSDYSW |
| | TGATKYHLNGRDSLVNPGPAMASHKDDEEKYFPQSGVLIFGKQDSGKTNVDIEKVMITDE |
| | EEIRTTNPVATEQYGSVSTNLQSGNTQAATSDVNTQGVLPGMVWQDRDVYLQGPIWAKIP |
| | HTDGHFHPSPPMGGFGLKHPPPQILIKNTPVPANPSTTFSAAKFASFITQYSTGQVSVEI |
| | EWELQKENSKRWNPEIQYTSNYNKSVNVDFTVDTNGVYSEPRPIGARYLTRNL |
| 1484 | MASGSGAPMADNNEGADGVGNSSGNWHCDSTWMGDRVI |
| | TTSTRTWALPTYNNHLYKQISSQSGASNDNHYFGYSTPWGYFDFNRFHCHFSPRDWQRLI |
| | NNNWGFRPKRLSFKLFNIQVKEVTQNDGTTTIANNLTSTVQVFTDSEYQLPYVLGSAHQG |
| | CLPPFPADVFMVPQYGYLTLNNGSQAVGRSSFYCLEYFPSQMLRTGNNFTFSYTFEDVPF |
| | HSSYAHSQSLDRLMNPLIDQYLYYLSRTNTPSGTTTMSRLQFSQAGASDIRDQSRNWLPG |
| | PCYRQQRVSKTAADNNNSDYSWTGATKYHLNGRDSLVNPGPAMASHKDDEEKYFPQSGVL |
| | IFGKQDSGKTNVDIEKVMITDEEEIRTTNPVATEQYGSVSTNLQSGNTQAATSDVNTQGV |
| | LPGMVWQDRDVYLQGPIWAKIPHTDGHFHPSPLMGGFGLKHPPPQILIKNTPVPANPSTT |
| | FSAAKFASFITQYSTGQVSVEIEWELQKENSKRWNPEIQYTSNYNKSVNVDFTVDTNGVY |
| | SEPRPIGTRYLTRNL |
| 1485 | MASGSGAPMADNNEGADGVGNSSGNWHCDSTWMGDRVITTSTRTWALPTYNNHLYKQISS |
| | QSGASNDNHYFGYSTPWGYFDFNRFHCHFSPRDWQRLINNNWGFRPKRLSFKLFNIQVKE |
| | VTQNDGTTTIANNLTSTVQVFTDSEYQLPYVLGSAHQGCLPPFPADVFMVPQYGYLTLNN |
| | GSQAVGRSSFYCLEYFPSQMLRTGNNFTFSYTFEDVPFHSSYAHSQSLDRLMNPLIDQYL |
| | YYLSRTNTPSGTTTMSRLQFSQAGASDIRDQSRNWLPGPCYRQQRVSKTAADNNNSDYSW |
| | TGATKYHLNGRDSLVNPGPAMASHKDDEEKYFPQSGVLIFGKQDSGKTNVDIEKVMITDE |
| | EEIRTTNPVATEQYGSVSTNLQSGNTQAATSDVNTQGVLPGMVWQDRDVYLQGPIWAKIP |
| | HTDGHFHPSPLMGGFGLKHPPPQILIKNTPVPANPSTTFSAAKFASFITQYSTGQVSVEI |
| | EWELQKENSKRWNPEIQYTSNYNKSVNVDFTVDTNGVYSEPRPIGTRYLTRNL |
| 1486 | MASGSGAPMADNNEGADGVGNSSGNWHCDSTWMGDRVI |
| | TTSTRTWALPTCNNHLYKQISSQSGASNDNHYFGYSTPWGYFDFNRFHCHFSPRDWQRLI |
| | NNNWGFRPKRLSFKLFNIQVKEVTQNDGTTTIANNLTSTVQVFTDSEYQLPYVLGSAHQG |
| | CLPPFPADVFMVPQYGYLTLNNGSQAVGRSSFYCLEYFPSQMLRTGNNFTFSYTFEDVPF |
| | HSSYAHSQSLDRLMNPLIDQYLYYLSRTNTPSGTTTMSRLQFSQAGASDIRDQSRNWLPG |
| | PCYRQQRVSKTAADNNNSDYSWTGATKYHLNGRDSLVNPGPAMASHKDDEEKYFPQSGVL |
| | IFGKQDSGKTNVDIEKVMITDEEEIRTTNPVATEQYGSVSTYLQSGNTQAATSDVNTQGV |
| | LPGMVWQDRDVYLRGPIWAKIPHTDGHFHPSPLMGGFGLKHPPPQILIKNTPVPANPSTT |
| | FSAAKFASFITQYSTGQVSVEIEWELQKENSKRWNPEIQYTSNYNKSVNVDFTVDINGVY |
| | SEPRPIGTRYLTRNL |
| 1487 | MASGSGAPMADNNEGADGVGNSSGNWHCDSTWMGDRVI |
| | TTSTRTWALPTCNNHLYKQISSQSGASNDNHYFGYSTPWGYFDFNRFHCHFSPRDWQRLI |
| | NNNWGFRPKRLSFKLFNIQVKEVTQNDGTTTIANNLTSTVQVFTDSEYQLPYVLGSAHQG |
| | CLPPFPADVFMVPQYGYLTLNNGSQAVGRSSFYCLEYFPSQMLRTGNNFTFSYTFEDVPF |
| | HSSYAHSQSLDRLMNPLIDQYLYYLSRTNTPSGTTTMSRLQFSQAGASDIRDQSRNWLPG |
| | PCYRQQRVSKTAADNNNSDYSWTGATKYHLNGRDSLVNPGPAMASHKDDEEKYFPQSGVL |
| | IFGKQDSGKTNVDIEKVMITDEEEIRTTNPVATEQYGSVSTYLQSGNTQAATSDVNTQGV |
| | LPGMVWQDRDVYLRGPIWAKIPHTDGHFHPSPLMGGFGLKHPPPQILIKNTPVPANPSTT |
| | FSAAKFASFITQYSTGQVSVEIEWELQKENSKRWNPEIQYTSNYNKSVNVDFTVDTNGVY |
| | SEPRPIGTRYLTRNL |
| 1488 | MASGSGAPMADNNEGADGVGNSSGNWHCDSTWMGDRVI |
| | TTSTRTWALPTYNNHLYKQISSQSGASNDNHYFGYSTPWGYFDFNRFHCHFSPRDWQRLI |
| | NNNWGFRPKRLSFKLFNIQVKEVTQNDGTTTIANNLTSTVQVFTDSEYQLPYVLGSAHQG |
| | CLPPFPADVFMVPQYGYLTLNNGSQAVGRSSFYCLEYFPSQMLRTGNNFTFSYTFEDVPF |
| | HSSYAHSQSLDRLMNPLIDQYLYYLSRTNTPSGTTTMSRLQFSQAGASDIRDQSRNWLPG |
| | PCYRQQRVSKTAADNNNSDYSWTGATKYHLNGRDSLVNPGPAMASHKDDEEKYFPQSGVL |
| | IFGKQDSGKTNVDIEKVMITDEEEIRTTNPVATEQYGSVSTNLQSGNTQAATSDVNTQGV |
| | LPGMVWQDRDVYLQGPIWAKIPHTDGHFHPSPLMGGFGLKHPPPQILIKNTPVPANPSTT |
| | FSAAKFASFITQYSTGQVSVEIEWELQKENSKRWNPEIQYTSNYNKSVNVDFTVDTNGVY |
| | SEPRPIGTRYLTRNL |
| 1489 | MASGSGAPMADNNEGADGVGNSSGNWHCDSTWMGDRVI |
| | TTSTRTWALPTYNNHLYKQISSQSGASNDNHYFGYSTPWGYFDFNRFHCHFSPRDWQRLI |
| | NNNWGFRPKRLSFKLFNIQVKEVTQNDGTTTIANNLTSTVQVFTDSGYQLPYVLGSAHQG |
| | CLPPFPADVFMVPQYGYLTLNNGSQAVGRSSFYCLEYFPSQMLRTGNNFTFSYTFEDVPF |
| | HSSYAHGQSLDRLMNPLIDQYLYYLSRTNTPSGTTTMSRLQFSQAGASDVRDQSRNWLPG |
| | PCYRQQRVSKTAADNNNSDYSWTGATKYHLNGRDSLVNPGPAMASHKDDEEKYFPQSGVL |
| | VFGKQDSGKTNVDIEKVMITDEEEIRTTNPAATEQYGSVSTNLQSGNTQAATSDVNTQGV |
| | LPGMVWQDRDVYLQGPIWAKIPHTDGHFHPSPLMGGFGLKHPPPQILIKNTPVPANPSTT |
| | FSAAKFVSFITQYSTGQVSVEIEWELQKENSKRWNPEIQYTSNYNKSVNVDFTVDTNGVY |
| | SEPRPIGTRYLTRNL |
| 1490 | MASGSGAPVADNNEGADGVGNSSGNWHCDSQWLGDRVI |
| | TTSTRTWALPTYNNHLYKQISSQSGASNDNHYFGYSTPWGYFDFNRFHCHFSPRDWQRLI |
| | NNSWGFRPKRLNFKLFNIQVKEVTQNDGTTTIANNLTSTVQVFTDSEYQLPYVLGSAHQG |
| | CLPPFPADVFMVPQYGYLTLNNGSQAVGRSSFYCLEYFPSQMLRTGNNFQFSYTFEDVPF |
| | HSSYAHSQSLDRLLNPLIDQYLYYLNKTQSNSGTLQQSRLLFSQAGPTSMSLQAKNWLPG |
| | PCYRQQRLSKQANDNNNSNFPWTAATKYHLNGRDSLVNPGPAMASHKDDEEKFFPMHGTL |
| | IFGKQGTNANDADLDNVMITDEEEIRTTNPVATEQYGYVSNNLQNSNTGPTTGTVNHQGA |
| | LPGMVWQDRDVYLQGPIWAKIPHTDGHFHPSPLMGGFGLKHPPPQIMIKNTPVPANPPTN |
| | FSSSKFASFITQYSTGQVSVEIEWELQKENSKRWNPEIQYTSNYNKSVNVDFTVDINGVY |
| | SEPRPIGTRYPTRNL |
| 1491 | MASGGGAPMADNNEGADGVGNASGNWHCDSTWLGDRVI |
| | TTSTRTWALPTYNNHLYKQISSTSTGASNDNHYFGYGTPWGYFDFNRFHCHFSPRDWQRL |
| | INNNWGFRPKRLNFKLFNIQVEEVTTNDGVTTIANNLTSTVQVFSDSEYQLPYVLGSAHQ |
| | GCLPPFPADVFMIPQYGYLTLNNGSQAVGRSSFYCLEYFPSQMLRTGNNFTFSYTFEEVP |
| | FHSSYAHSQSLDRLMNPLIDQYLYYLNRTQNQSGSAQNKDLLFSRGSPAGMSVQPKNWLP |
| | GPCYRQQRVSKTKTDNNNSNFTWTGASKYNLNGRESIINPGTAVASHKDDEDKFFPMSGV |
| | MIFGKESAGASSTALDNVMITDEEEIKATNPVATERFGTVAVNFQSSSTDPATGDVHAMG |
| | ALPGMVWQDRDVYLQGPIWAKIPHTDGHFHPSPLMGGFGLKNPPPQILIKNTPVPANPPA |
| | EFSATKFASFITQYSTGQVSVEIEWELQKENSKRWNPEVQYTSNYAKSANVDFTVDNNGL |
| | YTEPRPIGTRYLTRPL |
| 1492 | MASGGGAPMADNNEGADGVGNASGNWHCDSTWLGDRVI |
| | TTSTRTWALPTYNNHLYKQISSASTGASNDNHYFGYSTPWGYFDFNRFHCHFSPRDWQRL |
| | INNNWGFRPKRLNFKLFNIQVKEVTTNDGVTTIANNLTSTVQVFSDSEYQLPYVLGSAHQ |
| | GCLPPFPADVFMIPQYGYLTLNNGSQAVGRSSFYCLEYFPSQMLRTGNNFTFSYTFEEVP |
| | FHSSYAHSQSLDRLMNPLIDQYLYYPNRTQNQSGSAQNKDLLFSRGSPAGMSVQPKNWLP |
| | GPCYRQQRVSKTKTDNNNSNFTWTGASKYNLNGRESIINPGTAMASHKDDEDKFFPMSGV |
| | MIFGKESAGASNTALDNVMITDEEEIKATNPVATERFGTVAVNFQSSSTDPATGDVHAMG |
| | ALPGMVWQGRDVYLQGPIWAKIPHTDGHFHPSPLMGGFGLKNPPPQILIKNTPVPANPPA |
| | EFSATKFASFITQYSTGQVSVEIEWELQKENSKRWNPEVQYTSNYAKSANVDFTVDNNGL |
| | YTEPRPIGTRYLTRPL |
| 1493 | MASGGGAPMADNNEGADGVGNASGNWHCDSTWLGDRVI |
| | TTSTRTWALPTYNNHLYKQISSASTGASNDNHYFGYSTPWGYFDFNRFHCHFSPRDWQRL |
| | INNNWGFRPKRLNFKLFNIQVKEVTTNDGVTTIANNLTSTVQVFSDSEYQLPYVLGSAHQ |
| | GRLPPFPADVFMIPQYGYLTLNNGSQAVGRSSSYCLEYFPSQMLRTGNNFTFSYTFEEVP |
| | LHSSCAHSQSLDRLMNPLIDQYLYYLNRTQNQSGSAQNRDLLFSRGSPAGMSVQPKNWLP |
| | GPCYRQQRVSKTKTDNNNSNFTWTGASKYNLNGRESIINPGTAMASHKDDEDKFFPMSGV |
| | MIFGKESAGASNTALDNVMITDEEEIKATNPVATERFGTVAVNFQSSSTDPATGDVHAMG |
| | ALPGMVWQDRDVYLQGPIWAKIPHTDGHFHPSPLMGGFGLKNPPPQILIKNTPVPANPPA |
| | EFSATKFASFITQYSAGQVSVEIEWELQKENSKRWNPEVQYTSNYAKSANVDFTVDNNGL |
| | YTEPRPIGTRYLTRPL |
| 1494 | MASGGGAPMADNNEGADGVGNASGNWHCDSTWLGDRVI |
| | TTSTRTWALPTYNNHLYKQISSASTGASNDNHYFGYSTPWGYFDFNRFHCHFSPRDWQRL |
| | INNNWGFRPKRLNFKLFNIQVKEVTTNDGVTTIANNLTSTVQVFSDSEYQLPYVLGSAHQ |
| | GCLPPFPADVFMIPQYGYLTLNNGSQAVGRSSFYCLEYFPSQMLRTGNNFTFSYTFEEVP |
| | FHSSYAHSQSLDRLMNPLIDQYLYYLNRTQNQSGSAQNKDLLFSRGSPAGMSVQPKNWLP |
| | GPCYRQQRVSKTKTDNNNSNFTWTGASKYNLNGRESIINPGTAMASHKDDEDKFFPMSGV |
| | MIFGKESAGASNTALDNVMITDEEEIKATNPVATERFGTVAVNFQSSSTDPATGDVHAMG |
| | ALPGMVWQDRDVYLQGPIWAKIPHTDGHFHPSPLMGGFGLKNPPPQILIKNTPVPANPPA |
| | EFSATKFASFITQYSTGQVSVEIEWELQKENSKRWNPEVQYTSNYAKSANVDFTVDNNGL |
| | YTEPRPIGTRYLTRPL |

### BRIEF DESCRIPTION OF THE DRAWINGS

[0023] FIG. 1A-C show results from KT-430 administration on survival and growth in Mtm1 KO Mice.

[0024] FIG. 2 shows results from KT-430 administration on muscle function in Mtm1 KO

### Mice.

[0025] FIG. 3 shows the biodistribution of KT-430 in Mtm1 KO Mice

[0026] FIG. 4 shows dose-dependent expression of hMTM1 mRNA following treatment of KT-430 in Mtm1 KO Mice.

[0027] FIG. 5 shows the dose-dependent expression of MTM1 Protein Following Treatment of KT-430 in Mtm1 KO Mice.

### DETAILED DESCRIPTION

[0028] The present invention provides a novel muscle-tropic viral vector that achieves MTM1 expression in skeletal muscle with reduced exposure of the vector in liver tissue. Advantageously, by increasing expression of MTM1 in skeletal muscle, the vector of the present allows for administration of a dose of the composition comprising the vector that substantially reduces the exposure of non-target tissues to the composition.

### XLMTM and AT132

[0029] XLMTM results from pathogenic variants in the myotubularin (MTM1) gene, which encodes the protein myotubularin, a ubiquitously expressed lipid phosphatase that regulates intracellular membrane trafficking and vesicular transport, and whose function is required for the normal development, maturation, and maintenance of skeletal muscleReductions in functional myotubularin are associated with the profound skeletal muscle weakness responsible for the most prominent clinical manifestations of this disease.

[0030] MTM1 is a member of a large evolutionarily conserved family of myotubularin phosphatases. It is a ubiquitously expressed lipid phosphatase that dephosphorylates the D3 phosphate of the inositol ring of two types of phosphoinositides: the phosphatidylinositol 3-phosphate (PtdIns3P) and the phosphatidylinositol 3,5-bisphophate (PtdIns(3,5) P2). MTM1 regulates numerous cellular processes, including vesicle sorting through endosomal compartments, excitation-contraction coupling and T-tubule organization in muscle. Loss of function mutations in the MTM1 gene cause defects in these processes, which are believed to underly the severe motor dysfunction and histological defects in XLMTM diseased muscle.

[0031] Loss of MTM1 gene function in the mouse and dog is associated with similar functional and histological defects as in human children with XLMTM, including reduced survival, impaired motor function, muscle atrophy, reductions in contractile strength and associated histological defects in organelle organization including central nuclei, mislocalized mitochondria and T-tubule disorganization. The human MTM1 coding sequence is described in SEQ ID NO: 3. Restoration of functional myotubularin via AAV8-mediated gene therapy to express full-length murine MTM1 under the control of the desmin promoter has been shown to improve survival, body weight gain, muscle contractile force, motor function and histological defects in organelle mislocalization when administered by intramuscular or intravenous (IV) injection into Mtm1 knockout (KO) mice.

[0032] Without being bound to a mechanism of action, it is thought that XLMTM produces an abnormal hepatic substrate which is itself non-severe, but susceptible to additional insult. Hepatic abnormalities including cholestasis are part of the natural history of XLMTM. Hepatic manifestations are less prominent than the skeletal and respiratory muscle weakness which is the predominant and most frequently fatal clinical manifestation; however, hepatic manifestations may be more clinically relevant and increasingly recognized after the emergence of hepatotoxicity in the AT132 program. Cholestatic liver failure has not been reported to be part of the natural history of the disease, but there are case reports of substantial elevations in bilirubin in the setting of stressors such as respiratory infections, consistent with the existence of a predisposition to cholestasis which can be mild or even subclinical in the absence of clinical stress. It is presently unknown whether cholestasis or a predisposition to cholestasis may associated with other variables such as the specific MTM1 mutation, neonatal jaundice, and other hepatic abnormalities such as peliosis.

[0033] Relevant to the presently proposed program, the clinical doses of AT132 used to date have been high (1 E14 and 3 E14 vg/kg), similar to those used in other vector-based gene therapy programs, presumably in order to compensate for suboptimal biodistribution and/or expression in tissue(s) of interest due to use of unselected naturally occurring capsids. Interim data from ASPIRO reported as of Jan. 29, 2021 indicated that severe treatment-emergent hepatobiliary events were more common in the high-dose group (5 of 17 participants in the high-dose group vs. 0 out of 6 in the low-dose group), though presumably at least one subsequent event occurred in the low-dose group in the study participant reported in September 2021. Recently published biopsy and autopsy data indicated that study participants who experienced fatal hepatic events after treatment with AT132 had very high vector copy numbers (VCN) in the liver, in both absolute terms and relative to heart and skeletal muscle. In contrast, little to no MTM1 or myotubularin was identified in liver tissue. Without being bound to a mechanism of action, these findings suggest that the liver toxicity may be driven by the capsid rather than the transgene, that dose is a factor, and that reduced hepatic exposure to capsid may reduce the risk of vector-based gene therapy for boys with XLMTM. For example, other types of adverse events associated with vector-based gene therapies (such as complement activation and its sequelae) have not been reported in the ASPIRO trial.

### Adeno Associated Virus Vector

[0034] AAVs are particularly appropriate viral vectors for delivery of genetic material into mammalian cells. AAVs are not known to cause disease in mammals and cause a very mild immune response. Additionally, AAVs are able to infect cells in multiple stages whether at rest or in a phase of the cell replication cycle. Advantageously, AAV DNA is not regularly inserted into the host's genome at random sites, reducing the oncogenic properties of this vector.

[0035] AAVs have been engineered to deliver a variety of treatments, especially for genetic disorders caused by single nucleotide polymorphisms (“SNP”). Genetic diseases that have been studied in conjunction with AAV vectors include Cystic fibrosis, hemophilia, arthritis, macular degeneration, muscular dystrophy, Parkinson's disease, congestive heart failure, and Alzheimer's disease. The AAV can be used as a vector to deliver engineered nucleic acid to a host and utilize the host's own ribosomes to transcribe that nucleic acid into the desired proteins. Sec, e.g., West et al., Virology 160:38-47 (1987); U.S. Pat. No. 4,797,368; WO 93/24641; Kotin, Human Gene Therapy 5:793-801 (1994); and Muzyczka, J. Clin. Invest. 94:1351 (1994). AAVs have some deficiency in their replication and/or pathogenicity and thus can be safer that adenoviral vectors. In some embodiments, the AAV can integrate into a specific site on chromosome 19 of a human cell with no observable side effects. In some embodiments, the capacity of the AAV vector, system thereof, and/or AAV particles can be up to about 4.7 kb. The AAV vector or system thereof can include one or more engineered capsid polynucleotides described herein.

[0036] AAVs are small, replication-defective, nonenveloped viruses that infect humans and other primate species and have a linear single-stranded DNA genome. Naturally occurring AAV serotypes exhibit liver tropism. As a result, transfection of non-liver tissue with traditional AAV vectors is impeded by the virus's natural liver tropism. Moreover, because the liver acts to break down substances delivered to a subject, transfection of non-liver tissue with unmodified AAV vectors requires higher dosing to provide sufficient viral load to overcome the liver and reach non-liver tissue. More than 30 naturally occurring serotypes of AAV are available. Many natural variants in the AAV capsid exist. AAV serotypes include, but are not limited to, AAV serotypes AAV1, AAV2, AAV3, AAV3B, AAV4, AAV5, AAV6, AAV7, AAV8, AAV9, AAV10, AAV11, AAV 12, AAV13. AAVs may be engineered using conventional molecular biology techniques, making it possible to optimize these particles, for example, for cell specific delivery, for minimizing immunogenicity, for tuning stability and particle lifetime, for efficient degradation, for accurate delivery to the nucleus. AAV vectors can be specifically targeted to one or more types of cells by choosing the appropriate combination of AAV serotype, promoter, and delivery method.

[0037] Previous approaches to identify AAV sequences correlated with tropism have relied upon the comparison of highly related extant serotypes with distinct characteristics, random domain swaps between unrelated serotypes, or consideration of higher-order structure, to identify motifs that define liver tropism. For example, mapping determinants of AAV tropism have been carried out by comparing highly related serotypes. One such example is the single-amino acid change (E531K) between AAV1 and AAV6 that improves murine liver transduction in AAV1. See Wu et al. (2006) J. Virol., 80 (22): 11393-7, incorporated by reference herein. Another example is a reciprocal domain swap between AAV2 and AAV8 that alters tropism, but fails to define any robust specific tissue-targeting motifs. See Raupp et al. (201) J. Virol., 86 (17): 9396-408, incorporated by reference herein. Further, global consideration of structure has only highlighted gross differences between better- or worse-liver-transducers that are more observational than useful in practice. Nam et al (2007) J. Virol., 81 (22): 12260-71.

[0038] AAVs exhibiting modified tissue tropism that may be used with the present invention are described in U.S. Pat. Nos. 9,695,220, 9,719,070; 10,119,125; 10,526,584; U.S. Patent Application Publication No. 2018-0369414; U.S. Patent Application Publication No. 2020-0123504; U.S. Patent Application Publication No. 2020-0318082; PCT International Patent Application Publication No. WO 2015/054653; PCT International Patent Application Publication No. WO 2016/179496; PCT International Patent Application Publication No. WO 2017/100791; and PCT International Patent Application Publication No. WO 2019/217911, the entirety of the contents of each of which are incorporated by reference herein.

[0039] The AAV vector or system thereof may include one or more regulatory molecules, such as promoters, enhancers, repressors and the like. In some embodiments, the AAV vector or system thereof can include one or more polynucleotides that can encode one or more regulatory proteins. In some embodiments, the one or more regulatory proteins can be selected from Rep78, Rep68, Rep52, Rep40, variants thereof, and combinations thereof. In some embodiments, the muscle specific promoter can drive expression of an engineered AAV capsid polynucleotide.

[0040] The AAV vector or system thereof can include one or more polynucleotides that can encode one or more capsid proteins, such as the engineered AAV capsid proteins described elsewhere herein. The engineered capsid proteins can be capable of assembling into a protein shell (an engineered capsid) of the AAV virus particle. The engineered capsid can have a cell-, tissue-, and/or organ-specific tropism.

[0041] The AAV vector or system thereof can be configured to produce AAV particles having a specific serotype. In some embodiments, the serotype can be AAV-1, AAV-2, AAV-3, AAV-4, AAV-5, AAV-6, AAV-8, AAV-9 or any combinations thereof. In some embodiments, the AAV can be AAV1, AAV-2, AAV-5, AAV-9 or any combination thereof. One can select the AAV of the AAV with regard to the cells to be targeted; e.g., one can select AAV serotypes 1, 2, 5, 9 or a hybrid capsid AAV-1, AAV-2, AAV-5, AAV-9 or any combination thereof for targeting brain and/or neuronal cells; and one can select AAV-4 for targeting cardiac tissue; and one can select AAV-8 for delivery to the liver. Thus, in some embodiments, an AAV vector or system thereof capable of producing AAV particles capable of targeting the brain and/or neuronal cells can be configured to generate AAV particles having serotypes 1, 2, 5 or a hybrid capsid AAV-1, AAV-2, AAV-5 or any combination thereof. In some embodiments, an AAV vector or system thereof capable of producing AAV particles capable of targeting cardiac tissue can be configured to generate an AAV particle having an AAV-4 serotype. In some embodiments, an AAV vector or system thereof capable of producing AAV particles capable of targeting the liver can be configured to generate an AAV having an AAV-8 serotype. See also Srivastava. 2017. Curr. Opin. Virol. 21:75-80.

[0042] It will be appreciated that while the different serotypes can provide some level of cell, tissue, and/or organ specificity, each serotype still is multi-tropic and thus can result in tissue-toxicity if using that serotype to target a tissue that the serotype is less efficient in transducing. Thus, in addition to achieving some tissue targeting capacity via selecting an AAV of a particular serotype, it will be appreciated that the tropism of the AAV serotype can be modified by an engineered AAV capsid described herein. As described elsewhere herein, variants of wild-type AAV of any serotype can be generated via a method described herein and determined to have a particular cell-specific tropism, which can be the same or different as that of the reference wild-type AAV serotype. In some embodiments, the cell, tissue, and/or specificity of the wild-type serotype can be enhanced (e.g., made more selective or specific for a particular cell type that the serotype is already biased towards). For example, wild-type AAV-9 is biased towards muscle and brain in humans (see e.g., Srivastava. 2017. Curr. Opin. Virol. 21:75-80.) By including an engineered AAV capsid and/or capsid protein variant of wild-type AAV-9 as described herein, the tropism for nervous cells might be reduced or eliminated and/or the muscle specificity increased such that the nervous specificity appears reduced in comparison, thus enhancing the specificity for muscle as compared to the wild-type AAV-9. As previously mentioned, inclusion of an engineered capsid and/or capsid protein variant of a wild-type AAV serotype can have a different tropism than the wild-type reference AAV serotype. For example, an engineered AAV capsid and/or capsid protein variant of AAV-9 can have specificity for a tissue other than muscle or brain in humans.

[0043] In some embodiments, the AAV vector is a hybrid AAV vector or system thereof. Hybrid AAVs are AAVs that include genomes with elements from one serotype that are packaged into a capsid derived from at least one different serotype. For example, if it is the rAAV2/5 that is to be produced, and if the production method is based on the helper-free, transient transfection method discussed above, the 1st plasmid and the 3rd plasmid (the adeno helper plasmid) will be the same as discussed for rAAV2 production. However, the 2nd plasmid, the pRepCap will be different. In this plasmid, called pRep2/Cap5, the Rep gene is still derived from AAV2, while the Cap gene is derived from AAV5. The production scheme is the same as the above-mentioned approach for AAV2 production. The resulting rAAV is called rAAV2/5, in which the genome is based on recombinant AAV2, while the capsid is based on AAV5. It is assumed the cell or tissue-tropism displayed by this AAV2/5 hybrid virus should be the same as that of AAV5. It will be appreciated that wild-type hybrid AAV particles suffer the same specificity issues as with the non-hybrid wild-type serotypes previously discussed.

[0044] Advantages achieved by the wild-type based hybrid AAV systems can be combined with the increased and customizable cell-specificity that can be achieved with the engineered AAV capsids can be combined by generating a hybrid AAV that can include an engineered AAV capsid described elsewhere herein. It will be appreciated that hybrid AAVs can contain an engineered AAV capsid containing a genome with elements from a different serotype than the reference wild-type serotype that the engineered AAV capsid is a variant of. For example, a hybrid AAV can be produced that includes an engineered AAV capsid that is a variant of an AAV-9 serotype that is used to package a genome that contains components (e.g., rep elements) from an AAV-2 serotype. As with wild-type based hybrid AAVs previously discussed, the tropism of the resulting AAV particle will be that of the engineered AAV capsid.

[0045] In some embodiments, the AAV vector or system thereof is configured as a “gutless” vector, similar to that described in connection with a retroviral vector. In some embodiments, the “gutless” AAV vector or system thereof can have the cis-acting viral DNA elements involved in genome amplification and packaging in linkage with the heterologous sequences of interest (e.g., the engineered AAV capsid polynucleotide(s)).

[0046] The vectors described herein can be constructed using any suitable process or technique. In some embodiments, one or more suitable recombination and/or cloning methods or techniques can be used to the vector(s) described herein. Suitable recombination and/or cloning techniques and/or methods can include, but not limited to, those described in U.S. Application publication No. US 2004-0171156 A1. Other suitable methods and techniques are described elsewhere herein.

[0047] Construction of recombinant AAV vectors are described in a number of publications, including U.S. Pat. No. 5,173,414; Tratschin et al., Mol. Cell. Biol. 5:3251-3260 (1985); Tratschin, et al., Mol. Cell. Biol. 4:2072-2081 (1984); Hermonat & Muzyczka, PNAS 81:6466-6470 (1984); and Samulski et al., J. Virol. 63:03822-3828 (1989). Any of the techniques and/or methods can be used and/or adapted for constructing an AAV or other vector described herein. AAV vectors are discussed elsewhere herein.

[0048] In some embodiments, the vector can have one or more insertion sites, such as a restriction endonuclease recognition sequence (also referred to as a “cloning site”). In some embodiments, one or more insertion sites (e.g., about or more than about 1, 2, 3, 4, 5, 6, 7, 8, 9, 10, or more insertion sites) are located upstream and/or downstream of one or more sequence elements of one or more vectors.

[0049] Delivery vehicles, vectors, particles, nanoparticles, formulations and components thereof for expression of one or more elements of a engineered AAV capsid system described herein are as used in the foregoing documents, such as International Patent Application Publications WO WO 2021/050974 and WO 2021/077000 and PCT International Application No. PCT/US2021/042812, the contents of which are incorporated by reference herein.

[0050] Additional AAV vectors are described in International Patent Application Publication WO 2019/2071632, the contents of which are incorporated by reference herein.

[0051] Further AAV vectors are described in International Patent Application Publications WO 2020/086881 and WO 2020/235543, the contents of each of which are incorporated by reference herein.

[0052] Further AAV vectors are described in International Patent Application Publications WO 2005/033321; WO 2006/110689; WO 2007/127264; WO 2008/027084; WO 2009/073103; WO 2009/073104; WO 2009/105084; WO 2009/134681; WO 2009/136977; WO 2010/051367; WO 2010/138675; WO 2001/038187; WO 2012/112832; WO 2015/054653; WO 2016/179496; WO 2017/100791; WO 2017/019994; WO 2018/209154; WO 2019/067982; WO 2019/195701; WO 2019/217911; WO 2020/041498; WO 2020/210839; U.S. Pat. Nos. 7,906,111; 9,737,618; 10,265,417; 10,485,883; 10,695,441; 10,722,598; 8,999,678; 10,301,648; 10,626,415; 9,198,984; 10,155,931; 8,524,219; 9,206,238; 8,685,387; 9,359,618; 8,231,880; 8,470,310; 9,597,363; 8,940,290; 9,593,346; 10,501,757; 10,786,568; 10,973,928; 10,519,198; 8,846,031; 9,617,561; 9,884,071; 10,406,173; 9,596,220; 9,719,010; 10,117,125; 10,526,584; 10,881,548; 10,738,087; U.S. Patent Publication No. 2011-023353; U.S. Patent Publication No. 2019-0015527; U.S. Patent Publication No. 2020-155704; U.S. Patent Publication No 2017-0191079; U.S. Patent Publication No. 2019-0218574; U.S. Patent Publication No. 2020-0208176; U.S. Patent Publication No. 2020-0325491; U.S. Patent Publication No. 2019-0055523; U.S. Patent Publication No. 2020-0385689; U.S. Patent Publication No. 2009-0317417; U.S. Patent Publication No. 2016-0051603; U.S. Patent Publication No. 2016-00244783; U.S. Patent Publication No. 2017-0183636; U.S. Patent Publication No. 2020-0263201; U.S. Patent Publication No. 2020-0101099; U.S. Patent Publication No. 2020-0318082; U.S. Patent Publication No. 2018-0369414; U.S. Patent Publication No. 2019-0330278; U.S. Patent Publication No. 2020-0231986, the contents of each of which are incorporated by reference herein.

### Capsid Protein

[0053] The capsid protein is the shell or coating of the virus that enables its delivery into the host. Without the protein, the nucleic acids would be destroyed by the host without entering into the host cells and beginning transcription and translation. The capsid protein may be in the natural conformation of a naturally occurring AAV, or it may be modified.

[0054] In certain example embodiments, the AAV capsid protein is an engineered AAV capsid protein having reduced or eliminated uptake in a non-muscle cell as compared to a corresponding wild-type AAV capsid polypeptide.

[0055] In some embodiments, the engineered AAV capsid encoding polynucleotide can be included in a polynucleotide that is configured to be an AAV genome donor in an AAV vector system that can be used to generate engineered AAV particles described elsewhere herein. In some embodiments, the engineered AAV capsid encoding polynucleotide can be operably coupled to a poly adenylation tail. In some embodiments, the poly adenylation tail can be an SV40 poly adenylation tail. In some embodiments, the AAV capsid encoding polynucleotide can be operably coupled to a promoter. In some embodiments, the promoter can be a tissue specific promoter. In some embodiments, the tissue specific promoter is specific for muscle (e.g., cardiac, skeletal, and/or smooth muscle), neurons and supporting cells (e.g., astrocytes, glial cells, Schwann cells, etc.), fat, spleen, liver, kidney, immune cells, spinal fluid cells, synovial fluid cells, skin cells, cartilage, tendons, connective tissue, bone, pancreas, adrenal gland, blood cell, bone marrow cells, placenta, endothelial cells, and combinations thereof. In some embodiments, the promoter can be a constitutive promoter. Suitable tissue specific promoters and constitutive promoters are discussed elsewhere herein and are generally known in the art and can be commercially available. Suitable muscle specific promoters include, but are not limited to CK8, MHCK7, Myoglobin promoter (Mb), Desmin promoter, muscle creatine kinase promoter (MCK) and variants thereof, and SPc5-12 synthetic promoter.

[0056] Described herein are various embodiments of engineered viral capsids, such as adeno-associated virus (AAV) capsids, that can be engineered to confer cell-specific tropism, such as muscle specific tropism, to an engineered viral particle. Engineered viral capsids can be lentiviral, retroviral, adenoviral, or AAV capsids. The engineered capsids can be included in an engineered virus particle (e.g., an engineered lentiviral, retroviral, adenoviral, or AAV virus particle), and can confer cell-specific tropism, reduced immunogenicity, or both to the engineered viral particle. The engineered viral capsids described herein can include one or more engineered viral capsid proteins described herein. The engineered viral capsids described herein can include one or more engineered viral capsid proteins described herein that can contain a muscle-specific targeting moiety containing or composed of an n-mer motif described elsewhere herein.

[0057] The engineered viral capsid and/or capsid proteins can be encoded by one or more engineered viral capsid polynucleotides. In some embodiments, the engineered viral capsid polynucleotide is an engineered AAV capsid polynucleotide, engineered lentiviral capsid polynucleotide, engineered retroviral capsid polynucleotide, or engineered adenovirus capsid polynucleotide. In some embodiments, an engineered viral capsid polynucleotide (e.g., an engineered AAV capsid polynucleotide, engineered lentiviral capsid polynucleotide, engineered retroviral capsid polynucleotide, or engineered adenovirus capsid polynucleotide) can include a 3′ polyadenylation signal. The polyadenylation signal can be an SV40 polyadenylation signal.

[0058] The engineered viral capsids can be variants of wild-type viral capsid. For example, in some embodiments, the engineered AAV capsids can be variants of wild-type AAV capsids. In some embodiments, the wild-type AAV capsids can be composed of VP1, VP2, VP3 capsid proteins or a combination thereof. In other words, the engineered AAV capsids can include one or more variants of a wild-type VP1, wild-type VP2, and/or wild-type VP3 capsid proteins. In some embodiments, the serotype of the reference wild-type AAV capsid can be AAV-1, AAV-2, AAV-3, AAV-4, AAV-5, AAV-6, AAV-8, AAV-9 or any combination thereof. In some embodiments, the serotype of the wild-type AAV capsid can be AAV-9. The engineered AAV capsids can have a different tropism than that of the reference wild-type AAV capsid.

[0059] The engineered viral capsid can contain 1-60 engineered capsid proteins. In some embodiments, the engineered viral capsids can contain 1, 2, 3, 4, 5, 6, 7, 8, 9, 10, 11, 12, 13, 14, 15, 16, 17, 18, 19, 20, 21, 22, 23, 24, 25, 26, 27, 28, 29, 30, 31, 32, 33, 34, 35, 36, 37, 38, 39, 40, 41, 42, 43, 44, 45, 46, 47, 48, 49, 50, 51, 52, 53, 54, 55, 56, 57, 58, 59, or 60 engineered capsid proteins. In some embodiments, the engineered viral capsid can contain 0-59 wild-type viral capsid proteins. In some embodiments, the engineered viral capsid can contain 0, 1, 2, 3, 4, 5, 6, 7, 8, 9, 10, 11, 12, 13, 14, 15, 16, 17, 18, 19, 20, 21, 22, 23, 24, 25, 26, 27, 28, 29, 30, 31, 32, 33, 34, 35, 36, 37, 38, 39, 40, 41, 42, 43, 44, 45, 46, 47, 48, 49, 50, 51, 52, 53, 54, 55, 56, 57, 58, or 59 wild-type viral capsid proteins.

[0060] In some embodiments, the engineered AAV capsid can contain 1-60 engineered capsid proteins. In some embodiments, the engineered AAV capsids can contain 1, 2, 3, 4, 5, 6, 7, 8, 9, 10, 11, 12, 13, 14, 15, 16, 17, 18, 19, 20, 21, 22, 23, 24, 25, 26, 27, 28, 29, 30, 31, 32, 33, 34, 35, 36, 37, 38, 39, 40, 41, 42, 43, 44, 45, 46, 47, 48, 49, 50, 51, 52, 53, 54, 55, 56, 57, 58, 59, or 60 engineered capsid proteins. In some embodiments, the engineered AAV capsid can contain 0-59 wild-type AAV capsid proteins. In some embodiments, the engineered AAV capsid can contain 0, 1, 2, 3, 4, 5, 6, 7, 8, 9, 10, 11, 12, 13, 14, 15, 16, 17, 18, 19, 20, 21, 22, 23, 24, 25, 26, 27, 28, 29, 30, 31, 32, 33, 34, 35, 36, 37, 38, 39, 40, 41, 42, 43, 44, 45, 46, 47, 48, 49, 50, 51, 52, 53, 54, 55, 56, 57, 58, or 59 wild-type AAV capsid proteins.

[0061] In some embodiments, the engineered viral capsid protein can have an n-mer amino acid motif, where n can be at least 3 amino acids. In some embodiments, n can be 3, 4, 5, 6, 7, 8, 9, 10, 11, 12, 13, 14, or 15 amino acids. In some embodiments, an engineered AAV capsid can have a 6-mer or 7-mer amino acid motif. In some embodiments, the n-mer amino acid motif can be inserted between two amino acids in the wild-type viral protein (VP) (or capsid protein). In some embodiments, the n-mer motif can be inserted between two amino acids in a variable amino acid region in a viral capsid protein.

[0062] In some embodiments, the n-mer motif can be inserted between two amino acids in a variable amino acid region in an AAV capsid protein. The core of each wild-type AAV viral protein contains an eight-stranded beta-barrel motif (betaB to betaI) and an alpha-helix (alphaA) that are conserved in autonomous parvovirus capsids (see e.g., DiMattia et al. 2012. J. Virol. 86 (12): 6947-6958). Structural variable regions (VRs) occur in the surface loops that connect the beta-strands, which cluster to produce local variations in the capsid surface. AAVs have 12 variable regions (also referred to as hypervariable regions) (see e.g., Weitzman and Linden. 2011. “Adeno-Associated Virus Biology.” In Snyder, R. O., Moullier, P. (eds.) Totowa, NJ: Humana Press). In some embodiments, one or more n-mer motifs can be inserted between two amino acids in one or more of the 12 variable regions in the wild-type AVV capsid proteins. In some embodiments, the one or more n-mer motifs can be each be inserted between two amino acids in VR-I, VR-II, VR-III, VR-IV, VR-V, VR-VI, VR-VII, VR-III, VR-IX, VR-X, VR-XI, VR-XII, or a combination thereof. In some embodiments, the n-mer can be inserted between two amino acids in the VR-III of a capsid protein. In some embodiments, the engineered capsid can have an n-mer inserted between any two contiguous amino acids between amino acids 262 and 269, between any two contiguous amino acids between amino acids 327 and 332, between any two contiguous amino acids between amino acids 382 and 386, between any two contiguous amino acids between amino acids 452 and 460, between any two contiguous amino acids between amino acids 488 and 505, between any two contiguous amino acids between amino acids 545 and 558, between any two contiguous amino acids between amino acids 581 and 593, between any two contiguous amino acids between amino acids 704 and 714 of an AAV9 viral protein. In some embodiments, the engineered capsid can have an n-mer inserted between amino acids 588 and 589 of an AAV9 viral protein. In some embodiments, the engineered capsid can have a 7-mer motif inserted between amino acids 588 and 589 of an AAV9 viral protein. In other embodiments, the motif inserted is a 10-mer motif, with replacement of amino acids 586-88 and an insertion before 589. SEQ ID NO. 1 is a reference AAV9 capsid sequence for at least referencing the insertion sites discussed above. It will be appreciated that n-mers can be inserted in analogous positions in AAV viral proteins of other serotypes. In some embodiments as previously discussed, the n-mer(s) can be inserted between any two contiguous amino acids within the AAV viral protein and in some embodiments the insertion is made in a variable region.

[0063] In some embodiments, the first 1, 2, 3, or 4 amino acids of an n-mer motif can replace 1, 2, 3, or 4 amino acids of a polypeptide into which it is inserted and preceding the insertion site. In some embodiments, the amino acids of the n-mer motif that replace 1 or more amino acids of the polypeptide into which the n-mer motif is inserted come before or immediately before an “RGD” in an n-mer motif. For example, in one or more of the 10-mer inserts shown in e.g., Tables 2-3, the first three amino acids shown can replace 1-3 amino acids into a polypeptide to which they may be inserted. Using an AAV as another non-limiting example, one or more of the n-mer motifs can be inserted into e.g., and AAV9 capsid prolylpeptide between amino acids 588 and 589 and the insert can replace amino acids 586, 587, and 588 such that the amino acid immediately preceding the n-mer motif after insertion is residue 585. It will be appreciated that this principle can apply in any other insertion context and is not necessarily limited to insertion between residues 588 and 589 of an AAV9 capsid or equivalent position in another AAV capsid. It will further be appreciated that in some embodiments, no amino acids in the polypeptide into which the n-mer motif is inserted are replaced by the n-mer motif.

[0064] In some embodiments, the AAV capsids or other viral capsids or compositions can be muscle-specific. In some embodiments, muscle-specificity of the engineered AAV or other viral capsid or other composition is conferred by a muscle specific n-mer motif incorporated in the engineered AAV or other viral capsid or other composition described herein. While not intending to be bound by theory, it is believed that the n-mer motif confers a 3D structure to or within a domain or region of the engineered AAV capsid or other viral capsid or other composition such that the interaction of the viral particle or other composition containing the engineered AAV capsid or other viral capsid or other composition described herein has increased or improved interactions (e.g., increased affinity) with a cell surface receptor and/or other molecule on the surface of a muscle cell. In some embodiments, the cell surface receptor is AAV receptor (AAVR). In some embodiments, the cell surface receptor is a muscle cell specific AAV receptor. In some embodiments, the cell surface receptor or other molecule is a cell surface receptor or other molecule selectively expressed on the surface of a muscle cell. In some embodiments, the cell surface receptor or molecule is an integrin or dimer thereof. In some embodiments, the cell surface receptor or molecule is an Vb6 integrin heterodimer.

[0065] In some embodiments, a muscle specific engineered viral particle or other composition described herein containing the muscle-specific capsid, n-mer motif, or muscle-specific targeting moiety described herein can have an increased uptake, delivery rate, transduction rate, efficiency, amount, or a combination thereof in a muscle cell as compared to other cells types and/or other virus particles (including but not limited to AAVs) and other compositions that do not contain the muscle-specific n-mer motif of the present invention.

[0066] First- and second-generation muscle specific AAV capsids were developed using a muscle specific promoter and the resulting capsid libraries were screened in mice and non-human primates as described elsewhere herein and/or in e.g., U.S. Provisional Application Ser. Nos. 62/899,453, 62/916,207, 63/018,454, and 63/242,008. First and second generation myoAAV capsids were further optimized in mice and non-human primates as previously described to generate enhanced myoAAV capsids.

[0067] Tables 1 and 2 show the top hits of enhanced muscle specific n-mer motifs and their encoding sequence in rank order within each table. Enhanced MyoAAV (cMyoAAV) capsid variants can transduce mouse muscle more effectively as compared to the first generation MyoAAV after systemic delivery. First and second generation myoAAV capsid variants are dependent on the aVb6 integrin heterodimer for transduction of human primary myotubes.

[0068] Tables 3 and 4 show top-ranking capsid variants produced in rounds of directed evolution of capsid variants for skeletal muscle specificity. As shown in the Tables above with respect to those variant n-mer inserts containing P-motifs, the first three amino acids of the variant sequences shown are amino acids that replaced amino acids corresponding to positions 596, 597, and 598 of an AAV9 capsid polypeptide. Thus, the P-motif, for example, was inserted between amino acids at positions 598 and 599 of an AAV9 vector.

[0069] An AAV may further comprise may comprise vp1, vp2, and vp3 capsid proteins. The amino acid sequence of the vp1 capsid protein of vectors of the present invention may be selected from the sequences in Table 5, the amino acid sequence vp2 capsid protein may be selected from the sequences in Table 6, and/or the amino acid sequence vp3 capsid protein is selected from the sequences in Table 7.

### Promoter

[0070] The invention may contain a muscle specific promoter or another promoter. The promoter may be linked to the nucleic acid sequence so that the transcription preferably occurs within myocytes. Promoter regions enable the host cells to transcribe the transgene only in those cell types and tissues or organs in which the desired protein should be created. Here, the muscle specific promoter is included because it is principally desired that the proteins only be translated in myocytes. Specificity of the cell type into which the nucleic acid is delivered and thus the proteins translated is desired because of the adverse effects that may ensue from delivering the nucleic acid and having it translated in cells in which that nucleic acid and thus protein is not needed.

[0071] In some embodiments, the muscle specific promoter yields increased muscle cell potency, muscle cell specificity, reduced immunogenicity, or any combination thereof. As used herein the terms “muscle-specific”, “muscle cell specificity”, “muscle cell potency,” “myocyte specific” and the like, refer to the increased specificity, selectivity, or potency, of the muscle-specific targeting moieties and compositions incorporating said muscle-specific targeting moieties of the present invention for myocytes relative to non-muscle cells. In some embodiments, the cell specificity, or selectivity, or potency, or a combination thereof of a muscle-specific targeting moiety or composition incorporating a muscle-specific targeting moiety described herein is at least 2 to at least 500 times more specific, selective, and/or potent for/in a muscle cell relative to a non-muscle cell.

[0072] In some embodiments, the myocyte-selective promoter utilized is MHCK7. MHCK7 is a 771 base pair length promoter that is small enough to be included in an AAV vector. MHCK7 directs expression in fast and slow skeletal and cardiac muscle, with low expression in the liver, lung, and spleen. The MHCK7 promoter is associated with high levels of expression in skeletal muscles, including the diaphragm, and includes an enhancer to especially drive expression in the heart and skeletal muscle, whereas expression in off-target tissues is minimal. For example, the promoter may be an MHCK7 promoter with the nucleic acid sequence of SEQ ID NO: 2.

[0073] In some embodiments, the promoters described herein are inserted into an AAV protein (e.g., an AAV capsid protein) that has reduced specificity (or no detectable, measurable, or clinically relevant interaction) for one or more non-muscle cell types. Exemplary non-muscle cell types include, but are not limited to, liver, kidney, lung, spleen, central or peripheral nervous system cells, bone, immune, stomach, intestine, eye, skin cells and the like. In some embodiments, the non-muscle cells are liver cells.

[0074] The term “operably linked” refers to the association of two or more nucleic acid molecules on a single nucleic acid fragment so that the function of one is affected by the other.

[0075] Further exemplary tissue specific promoters include U6 promoter sequence, MHCK7 promoter sequence, CK6 promoter sequence, tMCK promoter sequence, CK5 promoter sequence, MCK promoter sequence, HAS promoter sequence, MPZ promoter sequence, desmin promoter sequence, APOA2 promoter sequence, hAAT promoter sequence, INS promoter sequence, IRS2 promoter sequence, MYH6 promoter sequence, MYL2 promoter sequence, TNNI3 promoter sequence, SYN1 promoter sequence, GFAP promoter sequence, NES promoter sequence, MBP promoter sequence, or TH promoter sequence.

[0076] Muscle specific promoters are described in International Patent Application Publications WO 2020/006458 and WO 2021/126880, the contents of each of which are incorporated by reference herein.

[0077] Further muscle specific promoters are described in U.S. Pat. Nos. 9,133,482; 10,105,453; 10,301,367; U.S. Patent Publication No. 2020-0360534; PCT International Patent Publication Nos. WO 2020/006458; WO 2021/035120; WO 2021/053124; and WO 2021/077000, the contents of each of which are incorporated by reference herein.

[0078] RNA polymerase II promoters that are inducible and/or tissue-specific have been previously described. RNA polymerase promoters are known in the art and further described in U.S. Patent Publication 11,149,288, the contents of which is incorporated by reference herein.

### Alternatively-Spliced Exons

[0079] Aspects of the invention comprise alternatively-spliced exons that may be used in the context of viral vectors to effectively regulate the expression of a coding region of the MTM1 gene. In certain embodiments, the alternatively-spliced exons regulate a coding region of interest in a condition-sensitive manner. A condition-sensitive manner means that the alternatively-spliced exon regulates the expression of a coding region of interest in a manner that is controlled or influenced by one or more conditions, including, but not limited to, environmental conditions, intracellular conditions, extracellular conditions, type of cell (e.g., liver cells versus muscle cells), gene expression pattern, or disease state. Accordingly, aspects of the invention comprise regulating expression of the coding region of the MTM1 gene in a condition-sensitive manner, by coupling the expression of a coding region of interest with an alternatively-spliced exon cassette. Alternatively spliced exons are described in PCT International Application No. PCT/US2022/017015, the entirety of the contents of which are incorporated by reference herein.

[0080] In some embodiments, the alternatively-spliced exon cassette comprises 1, 2, 3, or 4 alternatively-spliced exons. In some other embodiments, the alternatively-spliced exon cassette comprises 1, 2, 3, 4, 5, 6, 7, 8, 9, 10, 11, 12, 13, 14, 15, 16, 17, 18, 19, 20, 21, 22, 23, 24, or 25 alternatively-spliced exons. In some embodiments, wherein the alternatively-spliced exon cassette comprises more than one alternatively-spliced exon, the alternatively-spliced exons are adjacent. In some embodiments, wherein the alternatively-spliced exon cassette comprises more than one alternatively-spliced exon, the alternatively-spliced exons are not adjacent.

[0081] In some embodiments, the alternatively-spliced exon is synthetic or recombinant. In some embodiments, the alternatively-spliced exon is considered to be synthetic or recombinant because it undergoes one or more nucleic acid modifications, relative to the wild-type alternatively-spliced exon. A nucleic acid modification may be a substitution or deletion of one or more nucleotides that form the nucleic acid sequence of the alternatively-spliced exon.

[0082] In some embodiments, an alternative exon comprises an ATG start codon at its 3′ end. As will be understood, in some embodiments a wild-type or naturally occurring alternative exon may comprise an ATG start codon at its 3′ end. In such embodiments, the alternative exon may comprise nucleic acid modifications unrelated to the insertion of a heterologous start codon at the 3′ end of the alternative exon. However, it will be further understood that in some embodiments a wild-type or naturally occurring alternative exon may not comprise an ATG start codon at its 3′ end. In such embodiments, modifications are made to the 3′ end of the alternative exon to introduce a heterologous start codon, such that when the alternative exon is spliced-in or retained in the spliced transcript, the downstream coding sequence is translated as a full-length protein. As will be understood, in some embodiments 1, 2, or 3 nucleic acid substitutions may be necessary in order to introduce the heterologous ATG start codon to the 3′ end of the alternative exon, depending on the sequence which is present at the 3′ end of the wild-type or naturally occurring alternative exon. In such embodiments, the 3′ end of the alternatively-spliced exon comprises 1 nucleotide substitution, relative to the wild-type alternatively-spliced exon, to form the ATG start codon. In such embodiments, the 3′ end of the alternatively-spliced exon comprises 2 nucleotide substitutions, relative to the wild-type alternatively-spliced exon, to form the ATG start codon. In such embodiments, the 3′ end of the alternatively-spliced exon comprises 3 nucleotide substitutions, relative to the wild-type alternatively-spliced exon, to form the ATG start codon.

[0083] In some embodiments, the modification comprises the insertion of a heterologous start codon or part of a heterologous start codon at the 3′ end of the alternatively-spliced exon (e.g., 1-3 nucleic acids are added to the 3′ end of the alternatively-spliced exon, rather than substituted, to form an ATG start codon).

[0084] In some embodiments, wherein the alternative exon comprises 1, 2, or 3 nucleic acid substitutions at the 3′ end to result in a heterologous ATG start codon (e.g., if the wild-type alternatively-spliced exon does not comprise an ATG start codon at its 3′ end), the strength of the 5′ splice site of the alternative exon may be diminished, relative to the strength of the 5′ splice site strength of the wild-type or naturally occurring alternative exon. In such embodiments, one or more additional modifications made be made to the intronic sequence located immediately downstream of the sequence comprising the 3′ end of the alternative exon. In some embodiments, the first 10 nucleotides of the intronic sequence located immediately downstream of the alternatively-spliced exon comprise 1-5 nucleotide substitutions, relative to the naturally occurring or wild-type intronic sequence located immediately downstream of naturally occurring or wild-type alternative exon. In some embodiments, the first 10 nucleotides of the intronic sequence located immediately downstream of the alternatively-spliced exon comprise 1 nucleotide substitution, relative to the naturally occurring or wild-type intronic sequence located immediately downstream of naturally occurring or wild-type alternative exon. In some embodiments, the first 10 nucleotides of the intronic sequence located immediately downstream of the alternatively-spliced exon comprise 2 nucleotide substitutions, relative to the naturally occurring or wild-type intronic sequence located immediately downstream of naturally occurring or wild-type alternative exon. In some embodiments, the first 10 nucleotides of the intronic sequence located immediately downstream of the alternatively-spliced exon comprise 3 nucleotide substitutions, relative to the naturally occurring or wild-type intronic sequence located immediately downstream of naturally occurring or wild-type alternative exon. In some embodiments, the first 10 nucleotides of the intronic sequence located immediately downstream of the alternatively-spliced exon comprise 4 nucleotide substitutions, relative to the naturally occurring or wild-type intronic sequence located immediately downstream of naturally occurring or wild-type alternative exon. In some embodiments, the first 10 nucleotides of the intronic sequence located immediately downstream of the alternatively-spliced exon comprise 5 nucleotide substitutions, relative to the naturally occurring or wild-type intronic sequence located immediately downstream of naturally occurring or wild-type alternative exon. In some embodiments, the 1-5 nucleotide substitutions restore or partially restore the strength of the 5′ splice site of the alternative exon, relative to the strength of the 5′ splice site of the naturally occurring or wild-type alternative exon.

[0085] Additionally or alternatively, in some embodiments the modification comprises disrupting or deleting all native start codons located 5′ to the heterologous start codon. In some embodiments, wherein the alternatively-spliced exon cassette comprises more than one alternatively-spliced exon, all native start codons located 5′ to the heterologous start codon of the 5′-most alternatively-spliced exon are disrupted or deleted. Additionally or alternatively, in some embodiments the modification comprises introducing into the alternatively-spliced exon a heterologous, in-frame stop codon at least 50 nucleotides upstream of the next 5′ splice junction. In some embodiments, the alternatively-spliced exon is a nonsense-mediated decay (NMD) exon. In some embodiments, the NMD exon comprises an in-frame stop codon that is at least 50 nucleotides upstream of the next 5′ splice junction.

[0086] In some embodiments, the alternatively-spliced exon is considered to be synthetic when it is situated non-naturally (e.g., is linked to a coding sequence to which it would not be linked in wild-type or naturally-occurring conditions), relative to the wild-type alternatively-spliced exon (e.g., is heterologous). In some embodiments, the alternatively-spliced exon is considered to be synthetic when it (i) undergoes one or more nucleic acid modifications, and (ii) is situated non-naturally, relative to the wild-type alternatively-spliced exon.

[0087] In some embodiments, the alternatively-spliced exon is a regulatory exon. In some embodiments, the regulatory exon is an alternatively regulated exon (e.g., an exon known to be subject to alternative splicing mechanisms). It will be appreciated that alternative splicing is a process by which exons or portions of exons or noncoding regions within a pre-mRNA transcript are differentially joined or skipped, resulting in multiple protein isoforms being encoded by a single gene.

### Pharmaceutical Composition

[0088] Some embodiments of the invention may include any acceptable form of providing the AAV vector to a subject. For example, the AAV vector may be provided to the subject in the form of a composition or formulation comprising the AAV vector. The expression vector of this invention can be formulated and administered to treat a variety of disease states by any means that produces contact of the active ingredient with the agent's site of action in the body of the subject. The compositions, polynucleotides, polypeptides, particles, cells, vector systems and combinations thereof described herein can be contained in a formulation, such as a pharmaceutical formulation. In some embodiments, the formulations can be used to generate polypeptides and other particles that include one or more muscle-specific targeting moieties described herein. In some embodiments, the formulations can be delivered to a subject in need thereof. In some embodiments, component(s) of the engineered AAV capsid system, engineered cells, engineered AAV capsid particles, and/or combinations thereof described herein can be included in a formulation that can be delivered to a subject or a cell. In some embodiments, the formulation is a pharmaceutical formulation. One or more of the polypeptides, polynucleotides, vectors, cells, and combinations thereof described herein can be provided to a subject in need thereof or a cell alone or as an active ingredient, such as in a pharmaceutical formulation. As such, also described herein are pharmaceutical formulations containing an amount of one or more of the polypeptides, polynucleotides, vectors, cells, or combinations thereof described herein. In some embodiments, the pharmaceutical formulation can contain an effective amount of the one or more of the polypeptides, polynucleotides, vectors, cells, and combinations thereof described herein. The pharmaceutical formulations described herein can be administered to a subject in need thereof or a cell.

[0089] In some embodiments, the amount of the one or more of the polypeptides, polynucleotides, vectors, cells, virus particles, nanoparticles, other delivery particles, and combinations thereof described herein contained in the pharmaceutical formulation can range from about 1 μg/kg to about 10 mg/kg based upon the bodyweight of the subject in need thereof or average bodyweight of the specific patient population to which the pharmaceutical formulation can be administered. The amount of the one or more of the polypeptides, polynucleotides, vectors, cells, and combinations thereof described herein in the pharmaceutical formulation can range from about 1 μg to about 10 g, from about 10 nL to about 10 ml. In embodiments where the pharmaceutical formulation contains one or more cells, the amount can range from about 1 cell to 1×10², 1×10³, 1×10⁴, 1×10⁵, 1×10⁶, 1×10⁷, 1×10⁸, 1×10⁹, 1×10¹⁰ or more cells. In embodiments where the pharmaceutical formulation contains one or more cells, the amount can range from about 1 cell to 1×10², 1×10³, 1×10⁴, 1×10⁵, 1×10⁶, 1×10⁷, 1×10⁸, 1×10⁹, 1×10¹⁰ or more cells per nL, μL, mL, or L.

[0090] In embodiments, were engineered AAV capsid particles are included in the formulation, the formulation can contain 1 to 1×10², 1×10³, 1×10⁴, 1×10⁵, 1×10⁶, 1×10⁷, 1×10⁸, 1×10⁹, 1×10¹⁰, 1×10¹¹, 1×10¹², 1×10¹³, 1×10¹⁴, 1×10¹⁵, 1×10¹⁶, 1×10¹⁷, 1×10¹⁸, 1×10¹⁹, or 1×10²⁰ transducing units (TU)/mL of the engineered AAV capsid particles. In some embodiments, the formulation can be 0.1 to 100 mL in volume and can contain 1 to 1×10², 1×10³, 1×10⁴, 1×10⁵, 1×10⁶, 1×10⁷, 1×10⁸, 1×10⁹, 1×10¹⁰, 1×10¹¹, 1×10¹², 1×10¹³, 1×10¹⁴, 1×10¹⁵, 1×10¹⁶, 1×10¹⁷, 1×10¹⁸, 1×10¹⁹, or 1×10²⁰ transducing units (TU)/mL of the engineered AAV capsid particles.

### Pharmaceutically Acceptable Carriers and Auxiliary Ingredients and Agents

[0091] In embodiments, the pharmaceutical formulation containing an amount of one or more of the polypeptides, polynucleotides, vectors, cells, virus particles, nanoparticles, other delivery particles, and combinations thereof described herein can further include a pharmaceutically acceptable carrier. Suitable pharmaceutically acceptable carriers include, but are not limited to, water, salt solutions, alcohols, gum arabic, vegetable oils, benzyl alcohols, polyethylene glycols, gelatin, carbohydrates such as lactose, amylose or starch, magnesium stearate, talc, silicic acid, viscous paraffin, perfume oil, fatty acid esters, hydroxy methylcellulose, and polyvinyl pyrrolidone, which do not deleteriously react with the active composition.

[0092] The pharmaceutical formulations can be sterilized, and if desired, mixed with auxiliary agents, such as lubricants, preservatives, stabilizers, wetting agents, emulsifiers, salts for influencing osmotic pressure, buffers, coloring, flavoring and/or aromatic substances, and the like which do not deleteriously react with the active composition.

[0093] In some embodiments, the pharmaceutical formulations described herein may be in a dosage form. The dosage forms can be adapted for administration by any appropriate route. Appropriate routes include, but are not limited to, oral (including buccal or sublingual), rectal, epidural, intracranial, intraocular, inhaled, intranasal, topical (including buccal, sublingual, or transdermal), vaginal, intraurethral, parenteral, intracranial, subcutaneous, intramuscular, intravenous, intraperitoneal, intradermal, intraosseous, intracardiac, intraarticular, intracavernous, intrathecal, intravitreal, intracerebral, gingival, subgingival, intracerebroventricular, and intradermal. Such formulations may be prepared by any method known in the art.

[0094] Dosage forms adapted for oral administration can be discrete dosage units such as capsules, pellets or tablets, powders or granules, solutions, or suspensions in aqueous or non-aqueous liquids; edible foams or whips, or in oil-in-water liquid emulsions or water-in-oil liquid emulsions. In some embodiments, the pharmaceutical formulations adapted for oral administration also include one or more agents which flavor, preserve, color, or help disperse the pharmaceutical formulation. Dosage forms prepared for oral administration can also be in the form of a liquid solution that can be delivered as foam, spray, or liquid solution. In some embodiments, the oral dosage form can contain about 1 ng to 1000 g of a pharmaceutical formulation containing a therapeutically effective amount or an appropriate fraction thereof of the targeted effector fusion protein and/or complex thereof or composition containing the one or more of the polypeptides, polynucleotides, vectors, cells, and combinations thereof described herein. The oral dosage form can be administered to a subject in need thereof.

[0095] Where appropriate, the dosage forms described herein can be microencapsulated.

[0096] The dosage form can also be prepared to prolong or sustain the release of any ingredient. In some embodiments, the one or more of the polypeptides, polynucleotides, vectors, cells, and combinations thereof described herein can be the ingredient whose release is delayed. In other embodiments, the release of an optionally included auxiliary ingredient is delayed. Suitable methods for delaying the release of an ingredient include, but are not limited to, coating or embedding the ingredients in material in polymers, wax, gels, and the like. Delayed release dosage formulations can be prepared as described in standard references such as “Pharmaceutical dosage form tablets,” eds. Liberman et. al. (New York, Marcel Dekker, Inc., 1989), “Remington—The science and practice of pharmacy”, 20th ed., Lippincott Williams & Wilkins, Baltimore, MD, 2000, and “Pharmaceutical dosage forms and drug delivery systems”, 6th Edition, Ansel et al., (Media, PA: Williams and Wilkins, 1995). These references provide information on excipients, materials, equipment, and processes for preparing tablets and capsules and delayed release dosage forms of tablets and pellets, capsules, and granules. The delayed release can be anywhere from about an hour to about 3 months or more.

[0097] Examples of suitable coating materials include, but are not limited to, cellulose polymers such as cellulose acetate phthalate, hydroxypropyl cellulose, hydroxypropyl methylcellulose, hydroxypropyl methylcellulose phthalate, and hydroxypropyl methylcellulose acetate succinate; polyvinyl acetate phthalate, acrylic acid polymers and copolymers, and methacrylic resins that are commercially available under the trade name EUDRAGIT (as sold by Roth Pharma, Westerstadt, Germany), zein, shellac, and polysaccharides.

[0098] Coatings may be formed with a different ratio of water-soluble polymer, water insoluble polymers, and/or pH dependent polymers, with or without water insoluble/water soluble non-polymeric excipient, to produce the desired release profile. The coating is either performed on the dosage form (matrix or simple) which includes, but is not limited to, tablets (compressed with or without coated beads), capsules (with or without coated beads), beads, particle compositions, “ingredient as is” formulated as, but not limited to, suspension form or as a sprinkle dosage form.

[0099] Dosage forms adapted for topical administration can be formulated as ointments, creams, suspensions, lotions, powders, solutions, pastes, gels, sprays, aerosols, or oils. In some embodiments for treatments of the eye or other external tissues, for example the mouth or the skin, the pharmaceutical formulations are applied as a topical ointment or cream. When formulated in an ointment, the one or more of the polypeptides, polynucleotides, vectors, cells, and combinations thereof described herein can be formulated with a paraffinic or water-miscible ointment base. In some embodiments, the active ingredient can be formulated in a cream with an oil-in-water cream base or a water-in-oil base. Dosage forms adapted for topical administration in the mouth include lozenges, pastilles, and mouth washes.

[0100] Dosage forms adapted for nasal or inhalation administration include aerosols, solutions, suspension drops, gels, or dry powders. In some embodiments, the one or more of the polypeptides, polynucleotides, vectors, cells, and combinations thereof described herein is contained in a dosage form adapted for inhalation is in a particle-size-reduced form that is obtained or obtainable by micronization. In some embodiments, the particle size of the size reduced (e.g., micronized) compound or salt or solvate thereof, is defined by a D50 value of about 0.5 to about 10 microns as measured by an appropriate method known in the art. Dosage forms adapted for administration by inhalation also include particle dusts or mists. Suitable dosage forms wherein the carrier or excipient is a liquid for administration as a nasal spray or drops include aqueous or oil solutions/suspensions of an active ingredient (e.g., the one or more of the polypeptides, polynucleotides, vectors, cells, and combinations thereof described herein and/or auxiliary active agent), which may be generated by various types of metered dose pressurized aerosols, nebulizers, or insufflators.

[0101] In some embodiments, the dosage forms can be aerosol formulations suitable for administration by inhalation. In some of these embodiments, the aerosol formulation can contain a solution or fine suspension of the one or more of the polypeptides, polynucleotides, vectors, cells, and combinations thereof described herein and a pharmaceutically acceptable aqueous or non-aqueous solvent. Aerosol formulations can be presented in single or multi-dose quantities in sterile form in a sealed container. For some of these embodiments, the sealed container is a single dose or multi-dose nasal, or an aerosol dispenser fitted with a metering valve (e.g., metered dose inhaler), which is intended for disposal once the contents of the container have been exhausted.

[0102] Where the aerosol dosage form is contained in an aerosol dispenser, the dispenser contains a suitable propellant under pressure, such as compressed air, carbon dioxide, or an organic propellant, including but not limited to a hydrofluorocarbon. The aerosol formulation dosage forms in other embodiments are contained in a pump-atomizer. The pressurized aerosol formulation can also contain a solution or a suspension of one or more of the polypeptides, polynucleotides, vectors, cells, and combinations thereof described herein. In further embodiments, the aerosol formulation can also contain co-solvents and/or modifiers incorporated to improve, for example, the stability and/or taste and/or fine particle mass characteristics (amount and/or profile) of the formulation. Administration of the aerosol formulation can be once daily or several times daily, for example 2, 3, 4, or 8 times daily, in which 1, 2, or 3 doses are delivered each time.

[0103] For some dosage forms suitable and/or adapted for inhaled administration, the pharmaceutical formulation is a dry powder inhalable formulation. In addition to the one or more of the polypeptides, polynucleotides, vectors, cells, and combinations thereof described herein, an auxiliary active ingredient, and/or pharmaceutically acceptable salt thereof, such a dosage form can contain a powder base such as lactose, glucose, trehalose, mannitol, and/or starch. In some of these embodiments, the one or more of the polypeptides, polynucleotides, vectors, cells, and combinations thereof described herein is in a particle-size reduced form. In further embodiments, a performance modifier, such as L-leucine or another amino acid, cellobiose octaacetate, and/or metals salts of stearic acid, such as magnesium or calcium stearate.

[0104] In some embodiments, the aerosol dosage forms can be arranged so that each metered dose of aerosol contains a predetermined amount of an active ingredient, such as the one or more of the one or more of the polypeptides, polynucleotides, vectors, cells, and combinations thereof described herein.

[0105] Dosage forms adapted for vaginal administration can be presented as pessaries, tampons, creams, gels, pastes, foams, or spray formulations. Dosage forms adapted for rectal administration include suppositories or enemas.

[0106] Dosage forms adapted for parenteral administration and/or adapted for any type of injection (e.g. intravenous, intraperitoneal, subcutaneous, intramuscular, intradermal, intraosseous, epidural, intracardiac, intraarticular, intracavernous, gingival, subgingival, intrathecal, intravitreal, intracerebral, and intracerebroventricular) can include aqueous and/or non-aqueous sterile injection solutions, which can contain anti-oxidants, buffers, bacteriostats, solutes that render the composition isotonic with the blood of the subject, and aqueous and non-aqueous sterile suspensions, which can include suspending agents and thickening agents. The dosage forms adapted for parenteral administration can be presented in a single-unit dose or multi-unit dose containers, including but not limited to sealed ampoules or vials. The doses can be lyophilized and resuspended in a sterile carrier to reconstitute the dose prior to administration. Extemporaneous injection solutions and suspensions can be prepared in some embodiments, from sterile powders, granules, and tablets.

[0107] Dosage forms adapted for ocular administration can include aqueous and/or nonaqueous sterile solutions that can optionally be adapted for injection, and which can optionally contain anti-oxidants, buffers, bacteriostats, solutes that render the composition isotonic with the eye or fluid contained therein or around the eye of the subject, and aqueous and nonaqueous sterile suspensions, which can include suspending agents and thickening agents.

[0108] For some embodiments, the dosage form contains a predetermined amount of the one or more of the polypeptides, polynucleotides, vectors, cells, and combinations thereof described herein per unit dose. In some embodiments, the predetermined amount of the Such unit doses may therefore be administered once or more than once a day. Such pharmaceutical formulations may be prepared by any of the methods well known in the art.

### EXAMPLES

### Example 1: Efficacy of KT-430 in the MTM1 Knockout Mouse (Study KTS1020)

[0109] A novel composition, named KT-430, was tested as a therapeutic candidate for the treatment of XLMTM. KT-430 comprises a novel recombinant muscle-tropic capsid, termed MyoAAV3.8., for delivery of a nucleic acid encoding the MTM1 protein. The MyoAAV3.8 capsid delivers a transgene described in SEQ ID NO: 4.

[0110] Recently, MTM1 gene replacement using a first-generation MyoAAV capsid was shown to improve survival, body weight gain and motor function when expressing the human MTM1 coding sequence in the Mtm1 KO mouse, demonstrating that the human protein is efficacious in the mouse. See Tabebordbar, 2021, Cell 184:4919-4938, the entirety of the contents of which are incorporated by reference herein. This is consistent with the high degree of homology of MTM1 across eukaryotes, for example the human protein is 92 and 96% identical to the mouse and canine MTM1 proteins, respectively.

[0111] Restoration of functional myotubularin via AAV8-mediated gene therapy to express full-length canine MTM1 under the control of the desmin promoter was efficacious in the MTM1 p.N155K dog model. This AAV8-based vector improved survival and produced durable improvements in contractile muscle force, motor and respiratory function, and histological abnormalities when administered IV at high doses ≥2 E14 vg/kg. These preclinical studies using an AAV8-based gene therapy and desmin promoter predicted the clinical efficacy of AT132 (NCT03199469; ASPIRO), a related AAV8-based gene therapy (AAV8-desmin-hMTM1), thus validating the predictivity of these disease models and their pharmacological relevance.

[0112] By the present invention, KT-430, by virtue of its design and particularly its novel muscle-tropic capsid, MyoAAV3.8, was tested for its ability to achieve efficacious levels of transgene expression in skeletal muscle at a dose an order of magnitude lower than the lowest dose of AT132 used in ASPIRO. This dose would substantially reduce the exposure of non-target tissues to KT-430, potentially enabling clinical efficacy (improvements in muscle strength and reduced need for mechanical ventilation) with improved safety and in particular, reduced risk of hepatotoxicity in this population with great unmet medical need.

### Study Objective

[0113] The objective of the study was to evaluate the efficacy and biodistribution of KT-430 (MyoAAV3.8-MHCK7-hMTM1) in male MTM/KO mice across a dose-range (3 E11, 1 E12, and 3 E12 vg/kg) 10-weeks after a single IV injection.

### Methods

[0114] The Mtm1 KO mouse (B6; 129S-Mtm1^{tm1(Gt(OST290577)Lex}) was obtained and bred by Taconic Biosciences (Model #TF0892). The mouse model does not express MTM1 and exhibits reduced survival, muscle pathology and motor defects consistent with a previously published Mtm1 KO strain. Mice (n=6 hemizygous males/group) were administered a single IV (retro-orbital) injection (10 mL/kg) of vehicle (PBS+35 mM NaCl+0.001% Pluronic F68) or increasing doses of KT-430 at 4 weeks of age. A group of WT male littermates were treated in parallel with vehicle to permit comparisons relative to healthy mice. Mice were dosed at 4 weeks of age, since previous studies have established that AAV-based gene replacement is efficacious when administered shortly following weaning, but before the mice become moribund due to disease progression.

[0115] An interim efficacy assessment was conducted 4-weeks post-dose (8-weeks of age) at a time when most of the vehicle treated KO mice are still viable and able to perform functional tests, which included grip strength (Grip Strength Meter, Columbus Instruments), open field activity (Panlab Harvard Apparatus Open-Field Arena/LE800SC) and spontaneous running wheel activity (Med Associates Low Profile Wireless Running Wheel). Shortly thereafter the majority of the vehicle treated mice require humane euthanasia due to disease progression. At the end of the study, 10-weeks post-dose, another functional assessment was performed to assess efficacy of surviving mice by comparison to WT littermates. Mice were euthanized and tibialis, bicep and quadricep were weighed in pairs to assess muscle growth. Select muscle tissues were also evaluated microscopically for reversal of pathological abnormalities, including quantitation of central nuclei and fiber diameter, and staining for nicotinamide adenine dinucleotide (NADH) to assess organelle mislocalization. Heart and liver were also evaluated by light microscopy for potential toxicity. Tissues were assessed for biodistribution, including vector copy number (VCN), hMTM1 transgene mRNA and protein expression.

TABLE 5
Study Design for KTS1020

| | Test | | Formulated | Dose | No. |
|---|---|---|---|---|---|
| Group | Article | Dose | Concentration | Volume | Animals |
| 1 | Vehicle | — | — | 10 | 6 males (wild-type) |
| 2 | Vehicle | — | — | mL/kg | 6 males (knockout) |
| 3 | KT-430 | 3E11 vg/kg | 3E10 vg/mL | | 6 males (knockout) |
| 4 | KT-430 | 1E12 vg/kg | 1E11 vg/mL | | 6 males (knockout) |
| 5 | KT-430 | 3E12 vg/kg | 3E11 vg/mL | | 6 males (knockout) |

[0116] Biodistribution of vector genomes was evaluated by digital droplet PCR (ddPCR) using Taqman primers/probes directed towards the 3′ end of the hMTM1 coding sequence. The number of vector genomes was normalized to the number of diploid genomes using the murine telomerase (Tert) reference gene. To measure transgene mRNA, TaqMan assays were developed using the same primers directed towards the 3′ end of the hMTM1 coding sequence. Copy numbers of mRNA were quantitated relative to a standard curve and normalized to the levels of murine Gapdh mRNA as a reference gene. Additionally, the levels of the hMTM1 transgene mRNA were compared to endogenous levels of mouse Mtm1 determined from vehicle treated WT littermates in Group 1. Protein levels of Mtm1 were determined by western blot using an anti-Mtm1 antibody (Abnova).

### Results

[0117] FIG. 1A-C show results from KT-430 administration on survival and growth in Mtm1 KO Mice. Mtm1 KO mice were evaluated for survival, body weight and terminal muscle weight. FIG. 1A, Survival; FIG. 1B, Body weight, and FIG. 1C muscle weight of tibilias anterior and quadricep. Asterisks indicate statistical difference from vehicle treated KO mice (*p<0.05; **p<0.01).

[0118] Treatment with KT-430 led to a dose-dependent increase in survival. All vehicle treated KO mice had to be euthanized moribund between 8 and 10 weeks of age due to disease progression, consistent with the reduced survival reported elsewhere in Mtm1 KO mice. By contrast, all 6 KO mice in the high dose group (3 E12 vg/kg) survived to scheduled necropsy at week 10. In the low (3 E11 vg/kg) and mid (1 E12 vg/kg) dose group, 2/6 and 5/6 animals survived to week 10, respectively. There was also a dose-dependent increase in muscle weight (quadricep, tibialis) and body weight in KT-430 treated KO mice. Muscle and body weight in the high dose treated KO mice were not significantly different from WT animals at necropsy at week 10.

[0119] FIG. 2 shows results from KT-430 administration on muscle function in Mtm1 KO Mice. Mtm1 KO mice were treated at 4 weeks of age and evaluated for motor function at week 4 post-dose when vehicle treated KO mice are still viable. The mice were then evaluated a second time prior to necropsy at week 10 post-dose. A-B) Average peak force (newtons) of grip strength based on 5 repeat determinations per mouse. C-D) Spontaneous running wheel activity (average distance per day in kilometers) generated over 7-day (week 4) or 8-day period (week 10). E-F) Open field activity (total distance in centimeters) measured over 30 min period in open field arena. Asterisks indicate statistical difference from vehicle treated KO mice (*p<0.05; **p<0.01; ***p<0.001).

[0120] Vehicle treated Mtm1 KO mice exhibit a dramatic reduction in grip strength, open field activity (distance traveled) and spontaneous running wheel activity (average daily distance run over 7- to 8-day period) compared to WT littermates when measured at 8 weeks of age. Treatment with KT-430 resulted in a dose-dependent improvement in these measures of motor function, however due to high inter-animal variability the results only achieved statistical significance at the high dose.

[0121] Vehicle treated Mtm1 KO mice exhibit the expected pathological features of XLMTM, including reduced myofiber size, internal/central nucleation and abnormal localization of organelles in quadricep and bicep. Mtm1 KO mice treated with KT-430 showed a dose-dependent reversal of these histological features in quadricep and bicep at doses of 1 E12 and 3 E12 vg/kg, but no clear improvement at the low dose of 3 E11 vg/kg. This is consistent with the minimal improvements in motor function at this dose level. Liver and heart were histologically normal all doses tested of KT-430, further supporting the safety of KT-430. There were also no relevant changes in serum chemistry, including alanine transaminase, aspartate transaminase, alkaline phosphatase, bilirubin or creatine kinase in KT-430 treated mice.

### Vector Copy Number (VCN)

[0122] Biodistribution of vector genome DNA was evaluated in a subset of tissues in surviving KT-430-treated mice at week 10.

[0123] FIG. 3 shows the biodistribution of KT-430 in Mtm1 KO Mice. Abbreviations used in FIG. 3 include: KO=knockout; Mtm1=mouse myotubularin gene; Tert=telomerase; WT=wild type. Vector copy numbers per diploid genome in mice dosed with increasing doses of KT-430 (mean±Standard Deviation). Vector copy numbers are normalization to the mouse Tert gene (n=3-6/group).

[0124] Treatment with KT-430 results in a dose-dependent increase in vector genomes per diploid genome in all tissues evaluated. Levels in the liver at the efficacious dose of 3 E12 vg/kg was approximately 1 vg/dg. Levels in muscle and heart were less than 0.1 vg/dg.

### Transgene Expression

[0125] FIG. 4 shows dose-dependent expression of hMTM1 mRNA following treatment of KT-430 in Mtm1 KO Mice. Transgene mRNA levels (mean±Standard Deviation) of the hMTM1 transgene from mice treated with increasing doses of KT-430 (n=3-5/group) relative to endogenous murine Mtm1 mRNA was measured in vehicle treated WT mice. All data are normalized to the levels of murine Gapdh.

[0126] KT-430 treatment resulted in a dose-dependent increase in hMTM1 transgene mRNA in muscle and heart at the mid and high dose of 1 E12 and 3 E12 vg/kg. By comparison to endogenous murine Mtm1 mRNA levels, a dose of 1 E12 vg/kg results in hMTM1 mRNA levels that were approximately similar to physiological levels in muscle and heart. The high dose of 3 E12 vg/kg resulted in supra-physiological levels of transgene mRNA in muscle and heart (7 to 16-fold normal). The low dose of 3 E11 vg/kg produced detectable, but very low levels of transgene mRNA that were sub-physiological. Interestingly in liver the high dose of 3 E12 vg/kg produced physiological levels of transgene mRNA indicating that the MHCK7 promoter has weak activity in the liver.

[0127] FIG. 5 shows the dose-dependent expression of MTM1 Protein Following Treatment of KT-430 in Mtm1 KO Mice. hMTM1 protein levels (mean±Standard Deviation) from mice treated with increasing doses of KT-430 (n=3-5/group) relative to endogenous murine MTM1 in WT animals.

[0128] As expected, based on mRNA levels, KT-430 produced a dose-dependent in increase in hMTM1 protein expression in muscle, heart and liver. There was no appreciable MTM1 expression at 3 E11 vg/kg in any tissue, however sub-physiological MTM1 expression (<100% of normal) was observed at 1 E12 vg/kg in muscle and heart, and supra-physiological expression (>100% of normal) at 3 E12 vg/kg.

### CONCLUSION

[0129] In summary, these results demonstrate that KT-430 treatment results in a dose-dependent improvement in survival, body weight growth, and motor function. KT-430 is fully efficacious at a dose of 3 E12 vg/kg, consistent with achieving at least 100% of normal MTM1 expression in muscle. The mid dose of 1 E12 vg/kg showed some evidence of efficacy based on survival and trend towards improvements in body weight, muscle weight and motor function. This is consistent with the lower sub-physiological expression of hMTM1 mRNA and protein. Based on the efficacy and safety data, and consistent MTM1 protein expression in muscle at 10 weeks post-dose, treatment of KT-430 does not appear to be associated with an anti-transgene immune response or hepatotoxicity. These results support the biological activity of KT-430 and demonstrate that MTM1 gene replacement can reverse disease symptoms when expressed at physiological levels. The results also support the safety of KT-430.

### INCORPORATION BY REFERENCE

[0130] References and citations to other documents, such as patents, patent applications, patent publications, journals, books, papers, web contents, have been made throughout this disclosure. All such documents are hereby incorporated herein by reference in their entirety for all purposes.

### EQUIVALENTS

[0131] Various modifications of the invention and many further embodiments thereof, in addition to those shown and described herein, will become apparent to those skilled in the art from the full contents of this document, including references to the scientific and patent literature cited herein. The subject matter herein contains important information, exemplification and guidance that can be adapted to the practice of this invention in its various embodiments and equivalents thereof.

### Additional Sequences

The application's sequence listing, which the Patent Office published only in electronic form, follows.

SEQUENCE LISTING (1494 sequences)

SEQ ID NO: 1 - protein, 736 aa, synthetic construct
  REGION 1..736: note = Synthetic
MAADGYLPDWLEDNLSEGIREWWALKPGAPQPKANQQHQDNARGLVLPGYKYLGPGNGLDKGEPVNAADAAALEHDKAYDQQLKAGDNPYLKYNHADAEFQERLKEDTSFGGNLGRAVFQAKKRLLEPLGLVEEAAKTAPGKKRPVEQSPQEPDSSAGIGKSGAQPAKKRLNFGQTGDTESVPDPQPIGEPPAAPSGVGSLTMASGGGAPVADNNEGADGVGSSSGNWHCDSQWLGDRVITTSTRTWALPTYNNHLYKQISNSTSGGSSNDNAYFGYSTPWGYFDFNRFHCHFSPRDWQRLINNNWGFRPKRLNFKLFNIQVKEVTDNNGVKTIANNLTSTVQVFTDSDYQLPYVLGSAHEGCLPPFPADVFMIPQYGYLTLNDGSQAVGRSSFYCLEYFPSQMLRTGNNFQFSYEFENVPFHSSYAHSQSLDRLMNPLIDQYLYYLSKTINGSGQNQQTLKFSVAGPSNMAVQGRNYIPGPSYRQQRVSTTVTQNNNSEFAWPGASSWALNGRNSLMNPGPAMASHKEGEDRFFPLSGSLIFGKQGTGRDNVDADKVMITNEEEIKTTNPVATESYGQVATNHQSAQAQAQTGWVQNQGILPGMVWQDRDVYLQGPIWAKIPHTDGNFHPSPLMGGFGMKHPPPQILIKNTPVPADPPTAFNKDKLNSFITQYSTGQVSVEIEWELQKENSKRWNPEIQYTSNYYKSNNVEFAVNTEGVYSEPRPIGTRYLTRNL

SEQ ID NO: 2 - DNA, 771 bp, synthetic construct
  misc_feature 1..771: note = Synthetic
  source 1..771: mol_type = other DNA
ggaagagaaggtgacccttacccagttgttcaactcacccttcagattaaaaataactaaggtaagggcctgggtaggggaggtggtgtgagagggtcctgtctctcctctatctgcccatcggccctttggggaggaggaatgtgcccaaggactaaaaaaaggccctggagccagaggggcgagggcagcagacctttcatgggcaaacctcagggctgctggccactacgggtctaggctgcccatgtaaggaggcaaggcctggggacacccgagatgcctggttataattaacccagacatgtggctgcccccccccccccaacacctgctgcctgctaaaaataaccctgtccctggtggatatcaaggctgtgggggactgagggcaggctgtaacaggcttgggggccagggcttatacgtgcctgggactcccaaagtattactgttccatgttcccggcgaagggccagctgtcccccgccagctagactcagcacttagtttaggaaccagtgagcaagtcagcccttggggcagcccatacaaggccatggggctgggcaagctgcacgcctgggtccggggtgggcacggtgcccgggcaacgagctgaaagctcatctactctcaggggcccctccctggggacagcccctcctggctagtcacaccctgtaggctcctctatataacccaggggcacaggggctgccctcattctaccaccacctccacagcacagacagacactcaggagccagc

SEQ ID NO: 3 - DNA, 1812 bp, Homo sapiens
  source 1..1812: mol_type = other DNA
atggcttctgcatcaacttctaaatataattcacactccttggagaatgagtctattaagaggacgtctcgagatggagtcaatcgagatctcactgaggctgttcctcgacttccaggagaaacactaatcactgacaaagaagttatttacatatgtcctttcaatggccccattaagggaagagtttacatcacaaattatcgtctttatttaagaagtttggaaacggattcttctctaatacttgatgttcctctgggtgtgatctcgagaattgaaaaaatgggaggcgcgacaagtagaggagaaaattcctatggtctagatattacttgtaaagacatgagaaacctgaggttcgctttgaaacaggaaggccacagcagaagagatatgtttgagatcctcacgagatacgcgtttcccctggctcacagtctgccattatttgcatttttaaatgaagaaaagtttaacgtggatggatggacagtttacaatccagtggaagaatacaggaggcagggcttgcccaatcaccattggagaataacttttattaataagtgctatgagctctgtgacacttaccctgctcttttggtggttccgtatcgtgcctcagatgatgacctccggagagttgcaacttttaggtcccgaaatcgaattccagtgctgtcatggattcatccagaaaataagacggtcattgtgcgttgcagtcagcctcttgtcggtatgagtgggaaacgaaataaagatgatgagaaatatctcgatgttatcagggagactaataaacaaatttctaaactcaccatttatgatgcaagacccagcgtaaatgcagtggccaacaaggcaacaggaggaggatatgaaagtgatgatgcatatcataacgccgaacttttcttcttagacattcataatattcatgttatgcgggaatctttaaaaaaagtgaaggacattgtttatcctaatgtagaagaatctcattggttgtccagtttggagtctactcattggttagaacatatcaagctcgttttgacaggagccattcaagtagcagacaaagtttcttcagggaagagttcagtgcttgtgcattgcagtgacggatgggacaggactgctcagctgacatccttggccatgctgatgttggatagcttctataggagcattgaagggttcgaaatactggtacaaaaagaatggataagttttggacataaatttgcatctcgaataggtcatggtgataaaaaccacaccgatgctgaccgttctcctatttttctccagtttattgattgtgtgtggcaaatgtcaaaacagttccctacagcttttgaattcaatgaacaatttttgattataattttggatcatctgtatagttgccgatttggtactttcttattcaactgtgaatctgctcgagaaagacagaaggttacagaaaggactgtttctttatggtcactgataaacagtaataaagaaaaattcaaaaaccccttctatactaaagaaatcaatcgagttttatatccagttgccagtatgcgtcacttggaactctgggtgaattactacattagatggaaccccaggatcaagcaacaacagccgaatccagtggagcagcgttacatggagctcttagccttacgcgacgaatacataaagcggcttgaggaactgcagctcgccaactctgccaagctttctgatcccccaacttcaccttccagtccttcgcaaatgatgccccatgtgcaaactcacttctga

SEQ ID NO: 4 - DNA, 3281 bp, synthetic construct
  misc_feature 1..3281: note = Synthetic
  source 1..3281: mol_type = other DNA
gcgcgctcgctcgctcactgaggccgcccgggcaaagcccgggcgtcgggcgacctttggtcgcccggcctcagtgagcgagcgagcgcgcagagagggagtggccaactccatcactaggggttccttgtagttaatgattaacctctggaagagaaggtgacccttacccagttgttcaactcacccttcagattaaaaataactaaggtaagggcctgggtaggggaggtggtgtgagagggtcctgtctctcctctatctgcccatcggccctttggggaggaggaatgtgcccaaggactaaaaaaaggccctggagccagaggggcgagggcagcagacctttcatgggcaaacctcagggctgctggccactacgggtctaggctgcccatgtaaggaggcaaggcctggggacacccgagatgcctggttataattaacccagacatgtggctgcccccccccccccaacacctgctgcctgctaaaaataaccctgtccctggtggatatcaaggctgtgggggactgagggcaggctgtaacaggcttgggggccagggcttatacgtgcctgggactcccaaagtattactgttccatgttcccggcgaagggccagctgtcccccgccagctagactcagcacttagtttaggaaccagtgagcaagtcagcccttggggcagcccatacaaggccatggggctgggcaagctgcacgcctgggtccggggtgggcacggtgcccgggcaacgagctgaaagctcatctactctcaggggcccctccctggggacagcccctcctggctagtcacaccctgtaggctcctctatataacccaggggcacaggggctgccctcattctaccaccacctccacagcacagacagacactcaggagccagccagcccagtgggcaggtaagtatcaaggttacaagacaggtttaaggagaccaatagaaactgggcttgtcgagacagagaagactcttgcgtttctgataggcacctattggtcttactgacatccactttgcctttctctccacaggtgtccagaccggtgccaccatggcttctgcatcaacttctaaatataattcacactccttggagaatgagtctattaagaggacgtctcgagatggagtcaatcgagatctcactgaggctgttcctcgacttccaggagaaacactaatcactgacaaagaagttatttacatatgtcctttcaatggccccattaagggaagagtttacatcacaaattatcgtctttatttaagaagtttggaaacggattcttctctaatacttgatgttcctctgggtgtgatctcgagaattgaaaaaatgggaggcgcgacaagtagaggagaaaattcctatggtctagatattacttgtaaagacatgagaaacctgaggttcgctttgaaacaggaaggccacagcagaagagatatgtttgagatcctcacgagatacgcgtttcccctggctcacagtctgccattatttgcatttttaaatgaagaaaagtttaacgtggatggatggacagtttacaatccagtggaagaatacaggaggcagggcttgcccaatcaccattggagaataacttttattaataagtgctatgagctctgtgacacttaccctgctcttttggtggttccgtatcgtgcctcagatgatgacctccggagagttgcaacttttaggtcccgaaatcgaattccagtgctgtcatggattcatccagaaaataagacggtcattgtgcgttgcagtcagcctcttgtcggtatgagtgggaaacgaaataaagatgatgagaaatatctcgatgttatcagggagactaataaacaaatttctaaactcaccatttatgatgcaagacccagcgtaaatgcagtggccaacaaggcaacaggaggaggatatgaaagtgatgatgcatatcataacgccgaacttttcttcttagacattcataatattcatgttatgcgggaatctttaaaaaaagtgaaggacattgtttatcctaatgtagaagaatctcattggttgtccagtttggagtctactcattggttagaacatatcaagctcgttttgacaggagccattcaagtagcagacaaagtttcttcagggaagagttcagtgcttgtgcattgcagtgacggatgggacaggactgctcagctgacatccttggccatgctgatgttggatagcttctataggagcattgaagggttcgaaatactggtacaaaaagaatggataagttttggacataaatttgcatctcgaataggtcatggtgataaaaaccacaccgatgctgaccgttctcctatttttctccagtttattgattgtgtgtggcaaatgtcaaaacagttccctacagcttttgaattcaatgaacaatttttgattataattttggatcatctgtatagttgccgatttggtactttcttattcaactgtgaatctgctcgagaaagacagaaggttacagaaaggactgtttctttatggtcactgataaacagtaataaagaaaaattcaaaaaccccttctatactaaagaaatcaatcgagttttatatccagttgccagtatgcgtcacttggaactctgggtgaattactacattagatggaaccccaggatcaagcaacaacagccgaatccagtggagcagcgttacatggagctcttagccttacgcgacgaatacataaagcggcttgaggaactgcagctcgccaactctgccaagctttctgatcccccaacttcaccttccagtccttcgcaaatgatgccccatgtgcaaactcacttctgactagagctcgctgatcagcctcgactgtgccttctagttgccagccatctgttgtttgcccctcccccgtgccttccttgaccctggaaggtgccactcccactgtcctttcctaataaaatgaggaaattgcatcgcattgtctgagtaggtgtcattctattctggggggtggggtggggcaggacagcaagggggaggattgggaagagaatagcaggcatgctggggatcaggttaatcattaactacaaggaacccctagtgatggagttggccactccctctctgcgcgctcgctcgctcactgaggccgggcgaccaaaggtcgcccgacgcccgggctttgcccgggcggcctcagtgagcgagcgagcgcgc

SEQ ID NO: 5 - DNA, 133 bp, synthetic construct
  misc_feature 1..133: note = Synthetic
  source 1..133: mol_type = other DNA
gtaagtatcaaggttacaagacaggtttaaggagaccaatagaaactgggcttgtcgagacagagaagactcttgcgtttctgataggcacctattggtcttactgacatccactttgcctttctctccacag

SEQ ID NO: 6 - protein, 10 aa, synthetic construct
  REGION 1..10: note = Synthetic
NISRGDQGYQ

SEQ ID NO: 7 - protein, 10 aa, synthetic construct
  REGION 1..10: note = Synthetic
APARGDQGSQ

SEQ ID NO: 8 - protein, 10 aa, synthetic construct
  REGION 1..10: note = Synthetic
AVSRGDRMEF

SEQ ID NO: 9 - protein, 10 aa, synthetic construct
  REGION 1..10: note = Synthetic
SPSRGDQGRT

SEQ ID NO: 10 - protein, 10 aa, synthetic construct
  REGION 1..10: note = Synthetic
QMGRGDMGIK

SEQ ID NO: 11 - protein, 10 aa, synthetic construct
  REGION 1..10: note = Synthetic
EYRRGDKADI

SEQ ID NO: 12 - protein, 10 aa, synthetic construct
  REGION 1..10: note = Synthetic
ESRRGDKEPL

SEQ ID NO: 13 - protein, 10 aa, synthetic construct
  REGION 1..10: note = Synthetic
AHMRGDLGGT

SEQ ID NO: 14 - protein, 10 aa, synthetic construct
  REGION 1..10: note = Synthetic
VWQRGDKMDM

SEQ ID NO: 15 - protein, 10 aa, synthetic construct
  REGION 1..10: note = Synthetic
SIGRGDTGHM

SEQ ID NO: 16 - protein, 10 aa, synthetic construct
  REGION 1..10: note = Synthetic
NIARGDAGQY

SEQ ID NO: 17 - protein, 10 aa, synthetic construct
  REGION 1..10: note = Synthetic
SVSRGDQGLH

SEQ ID NO: 18 - protein, 10 aa, synthetic construct
  REGION 1..10: note = Synthetic
QIGRGDITHG

SEQ ID NO: 19 - protein, 10 aa, synthetic construct
  REGION 1..10: note = Synthetic
EVRRGDLHGT

SEQ ID NO: 20 - protein, 10 aa, synthetic construct
  REGION 1..10: note = Synthetic
SVSRGDVHTM

SEQ ID NO: 21 - protein, 10 aa, synthetic construct
  REGION 1..10: note = Synthetic
MVTRGDLGTR

SEQ ID NO: 22 - protein, 10 aa, synthetic construct
  REGION 1..10: note = Synthetic
NGGRGDTTHF

SEQ ID NO: 23 - protein, 10 aa, synthetic construct
  REGION 1..10: note = Synthetic
TMGRGDMNSL

SEQ ID NO: 24 - protein, 10 aa, synthetic construct
  REGION 1..10: note = Synthetic
AISRGDQGLS

SEQ ID NO: 25 - protein, 10 aa, synthetic construct
  REGION 1..10: note = Synthetic
NDARGDKSTY

SEQ ID NO: 26 - protein, 10 aa, synthetic construct
  REGION 1..10: note = Synthetic
VGLRGDLTGS

SEQ ID NO: 27 - protein, 10 aa, synthetic construct
  REGION 1..10: note = Synthetic
EMRRGDLGTS

SEQ ID NO: 28 - protein, 10 aa, synthetic construct
  REGION 1..10: note = Synthetic
AMSRGDMGMA

SEQ ID NO: 29 - protein, 10 aa, synthetic construct
  REGION 1..10: note = Synthetic
NVARGDQVNY

SEQ ID NO: 30 - protein, 10 aa, synthetic construct
  REGION 1..10: note = Synthetic
ASVRGDLSGS

SEQ ID NO: 31 - protein, 10 aa, synthetic construct
  REGION 1..10: note = Synthetic
SAARGDTERL

SEQ ID NO: 32 - protein, 10 aa, synthetic construct
  REGION 1..10: note = Synthetic
VPGRGDLNTM

SEQ ID NO: 33 - protein, 10 aa, synthetic construct
  REGION 1..10: note = Synthetic
TSVRGDHGTL

SEQ ID NO: 34 - protein, 10 aa, synthetic construct
  REGION 1..10: note = Synthetic
TPSRGDLGQT

SEQ ID NO: 35 - protein, 10 aa, synthetic construct
  REGION 1..10: note = Synthetic
AGHRGDTGVI

SEQ ID NO: 36 - protein, 10 aa, synthetic construct
  REGION 1..10: note = Synthetic
APARGDQGSM

SEQ ID NO: 37 - protein, 10 aa, synthetic construct
  REGION 1..10: note = Synthetic
MSLRGDLNGS

SEQ ID NO: 38 - protein, 10 aa, synthetic construct
  REGION 1..10: note = Synthetic
EAKRGDVHSI

SEQ ID NO: 39 - protein, 10 aa, synthetic construct
  REGION 1..10: note = Synthetic
SAQRGDVQAV

SEQ ID NO: 40 - protein, 10 aa, synthetic construct
  REGION 1..10: note = Synthetic
STARGDQGDR

SEQ ID NO: 41 - protein, 10 aa, synthetic construct
  REGION 1..10: note = Synthetic
QISRGDLGIN

SEQ ID NO: 42 - protein, 10 aa, synthetic construct
  REGION 1..10: note = Synthetic
TFTRGDMTMN

SEQ ID NO: 43 - protein, 10 aa, synthetic construct
  REGION 1..10: note = Synthetic
QEGRGDLNMR

SEQ ID NO: 44 - protein, 10 aa, synthetic construct
  REGION 1..10: note = Synthetic
AHARGDTSSL

SEQ ID NO: 45 - protein, 10 aa, synthetic construct
  REGION 1..10: note = Synthetic
TNGRGDAGTL

SEQ ID NO: 46 - protein, 10 aa, synthetic construct
  REGION 1..10: note = Synthetic
AFGRGDQGQL

SEQ ID NO: 47 - protein, 10 aa, synthetic construct
  REGION 1..10: note = Synthetic
ADGRGDRSSL

SEQ ID NO: 48 - protein, 10 aa, synthetic construct
  REGION 1..10: note = Synthetic
DGRRGDGHSL

SEQ ID NO: 49 - protein, 10 aa, synthetic construct
  REGION 1..10: note = Synthetic
EKLRGDLHST

SEQ ID NO: 50 - protein, 10 aa, synthetic construct
  REGION 1..10: note = Synthetic
EARRGDASAM

SEQ ID NO: 51 - protein, 10 aa, synthetic construct
  REGION 1..10: note = Synthetic
MGTRGDKMDF

SEQ ID NO: 52 - protein, 10 aa, synthetic construct
  REGION 1..10: note = Synthetic
STSRGDRESY

SEQ ID NO: 53 - protein, 10 aa, synthetic construct
  REGION 1..10: note = Synthetic
CQPRGDTTRC

SEQ ID NO: 54 - protein, 10 aa, synthetic construct
  REGION 1..10: note = Synthetic
MHTRGDKMDF

SEQ ID NO: 55 - protein, 10 aa, synthetic construct
  REGION 1..10: note = Synthetic
YSARGDTSGL

SEQ ID NO: 56 - protein, 10 aa, synthetic construct
  REGION 1..10: note = Synthetic
STMRGDHEKL

SEQ ID NO: 57 - protein, 10 aa, synthetic construct
  REGION 1..10: note = Synthetic
TQMRGDGVTL

SEQ ID NO: 58 - protein, 10 aa, synthetic construct
  REGION 1..10: note = Synthetic
TTRRGDMGDN

SEQ ID NO: 59 - protein, 10 aa, synthetic construct
  REGION 1..10: note = Synthetic
ANGRGDRLEL

SEQ ID NO: 60 - protein, 10 aa, synthetic construct
  REGION 1..10: note = Synthetic
ENQRGDLSGR

SEQ ID NO: 61 - protein, 10 aa, synthetic construct
  REGION 1..10: note = Synthetic
STGRGDLGQA

SEQ ID NO: 62 - protein, 10 aa, synthetic construct
  REGION 1..10: note = Synthetic
SSARGDYSEV

SEQ ID NO: 63 - protein, 10 aa, synthetic construct
  REGION 1..10: note = Synthetic
STARGDAATY

SEQ ID NO: 64 - protein, 10 aa, synthetic construct
  REGION 1..10: note = Synthetic
VNTRGDTQKL

SEQ ID NO: 65 - protein, 10 aa, synthetic construct
  REGION 1..10: note = Synthetic
AMSRGDHASL

SEQ ID NO: 66 - protein, 10 aa, synthetic construct
  REGION 1..10: note = Synthetic
QAARGDVNKL

SEQ ID NO: 67 - protein, 10 aa, synthetic construct
  REGION 1..10: note = Synthetic
RGTRGDTVEL

SEQ ID NO: 68 - protein, 10 aa, synthetic construct
  REGION 1..10: note = Synthetic
ASTRGDYAGV

SEQ ID NO: 69 - protein, 10 aa, synthetic construct
  REGION 1..10: note = Synthetic
DDRRGDKLPL

SEQ ID NO: 70 - protein, 10 aa, synthetic construct
  REGION 1..10: note = Synthetic
SGSRGDLNAV

SEQ ID NO: 71 - protein, 10 aa, synthetic construct
  REGION 1..10: note = Synthetic
EYRRGDQQIQ

SEQ ID NO: 72 - protein, 10 aa, synthetic construct
  REGION 1..10: note = Synthetic
TYVRGDRAEV

SEQ ID NO: 73 - protein, 10 aa, synthetic construct
  REGION 1..10: note = Synthetic
QSLRGDLNGS

SEQ ID NO: 74 - protein, 10 aa, synthetic construct
  REGION 1..10: note = Synthetic
EGRRGDTTSL

SEQ ID NO: 75 - protein, 10 aa, synthetic construct
  REGION 1..10: note = Synthetic
AENRGDRSSL

SEQ ID NO: 76 - protein, 10 aa, synthetic construct
  REGION 1..10: note = Synthetic
VAGRGDRSEL

SEQ ID NO: 77 - protein, 10 aa, synthetic construct
  REGION 1..10: note = Synthetic
DPARGDIGAR

SEQ ID NO: 78 - protein, 10 aa, synthetic construct
  REGION 1..10: note = Synthetic
VIGRGDKALQ

SEQ ID NO: 79 - protein, 10 aa, synthetic construct
  REGION 1..10: note = Synthetic
SFERGDKNSL

SEQ ID NO: 80 - protein, 10 aa, synthetic construct
  REGION 1..10: note = Synthetic
QIARGDIASV

SEQ ID NO: 81 - protein, 10 aa, synthetic construct
  REGION 1..10: note = Synthetic
TISRGDLGGA

SEQ ID NO: 82 - protein, 10 aa, synthetic construct
  REGION 1..10: note = Synthetic
AMIRGDMTHS

SEQ ID NO: 83 - protein, 10 aa, synthetic construct
  REGION 1..10: note = Synthetic
TMRRGDLNDS

SEQ ID NO: 84 - protein, 10 aa, synthetic construct
  REGION 1..10: note = Synthetic
AYSRGDLGNH

SEQ ID NO: 85 - protein, 10 aa, synthetic construct
  REGION 1..10: note = Synthetic
EERRGDTHRL

SEQ ID NO: 86 - protein, 10 aa, synthetic construct
  REGION 1..10: note = Synthetic
SQLRGDAGTI

SEQ ID NO: 87 - protein, 10 aa, synthetic construct
  REGION 1..10: note = Synthetic
AMVRGDAHQL

SEQ ID NO: 88 - protein, 10 aa, synthetic construct
  REGION 1..10: note = Synthetic
TTSRGDLNSV

SEQ ID NO: 89 - protein, 10 aa, synthetic construct
  REGION 1..10: note = Synthetic
WEQRGDMIGK

SEQ ID NO: 90 - protein, 10 aa, synthetic construct
  REGION 1..10: note = Synthetic
YTTRGDLQSN

SEQ ID NO: 91 - protein, 10 aa, synthetic construct
  REGION 1..10: note = Synthetic
MSQRGDLSHQ

SEQ ID NO: 92 - protein, 10 aa, synthetic construct
  REGION 1..10: note = Synthetic
ASTRGDTTHM

SEQ ID NO: 93 - protein, 10 aa, synthetic construct
  REGION 1..10: note = Synthetic
SDTRGDTHRL

SEQ ID NO: 94 - protein, 10 aa, synthetic construct
  REGION 1..10: note = Synthetic
TLGRGDQYTS

SEQ ID NO: 95 - protein, 10 aa, synthetic construct
  REGION 1..10: note = Synthetic
SYARGDVREV

SEQ ID NO: 96 - protein, 10 aa, synthetic construct
  REGION 1..10: note = Synthetic
ETRRGDLSQN

SEQ ID NO: 97 - protein, 10 aa, synthetic construct
  REGION 1..10: note = Synthetic
TIGRGDLMDK

SEQ ID NO: 98 - protein, 10 aa, synthetic construct
  REGION 1..10: note = Synthetic
SYTRGDLSQN

SEQ ID NO: 99 - protein, 10 aa, synthetic construct
  REGION 1..10: note = Synthetic
SKLRGDASEI

SEQ ID NO: 100 - protein, 10 aa, synthetic construct
  REGION 1..10: note = Synthetic
SMARGDKAEI

SEQ ID NO: 101 - protein, 10 aa, synthetic construct
  REGION 1..10: note = Synthetic
GAVRGDHSSL

SEQ ID NO: 102 - protein, 10 aa, synthetic construct
  REGION 1..10: note = Synthetic
METRGDMSNR

SEQ ID NO: 103 - protein, 10 aa, synthetic construct
  REGION 1..10: note = Synthetic
AYTRGDKDAL

SEQ ID NO: 104 - protein, 10 aa, synthetic construct
  REGION 1..10: note = Synthetic
ENRRGDITQS

SEQ ID NO: 105 - protein, 10 aa, synthetic construct
  REGION 1..10: note = Synthetic
MLLRGDKNDF

SEQ ID NO: 106 - protein, 10 aa, synthetic construct
  REGION 1..10: note = Synthetic
KVQRGDASDW

SEQ ID NO: 107 - protein, 10 aa, synthetic construct
  REGION 1..10: note = Synthetic
AFTRGDMQTA

SEQ ID NO: 108 - protein, 10 aa, synthetic construct
  REGION 1..10: note = Synthetic
QPKRGDVQAQ

SEQ ID NO: 109 - protein, 10 aa, synthetic construct
  REGION 1..10: note = Synthetic
ASLRGDMGVS

SEQ ID NO: 110 - protein, 10 aa, synthetic construct
  REGION 1..10: note = Synthetic
AYSRGDKESF

SEQ ID NO: 111 - protein, 10 aa, synthetic construct
  REGION 1..10: note = Synthetic
RFQRGDLTDA

SEQ ID NO: 112 - protein, 10 aa, synthetic construct
  REGION 1..10: note = Synthetic
SDARGDTMKL

SEQ ID NO: 113 - protein, 10 aa, synthetic construct
  REGION 1..10: note = Synthetic
SGARGDTVSL

SEQ ID NO: 114 - protein, 10 aa, synthetic construct
  REGION 1..10: note = Synthetic
DEKRGDQKHL

SEQ ID NO: 115 - protein, 10 aa, synthetic construct
  REGION 1..10: note = Synthetic
NGVRGDVQNF

SEQ ID NO: 116 - protein, 10 aa, synthetic construct
  REGION 1..10: note = Synthetic
MTLRGDLGGS

SEQ ID NO: 117 - protein, 10 aa, synthetic construct
  REGION 1..10: note = Synthetic
GQERGDLGTR

SEQ ID NO: 118 - protein, 10 aa, synthetic construct
  REGION 1..10: note = Synthetic
RGARGDLVDA

SEQ ID NO: 119 - protein, 10 aa, synthetic construct
  REGION 1..10: note = Synthetic
QYSRGDHTDL

SEQ ID NO: 120 - protein, 10 aa, synthetic construct
  REGION 1..10: note = Synthetic
MNTRGDVHAM

SEQ ID NO: 121 - protein, 10 aa, synthetic construct
  REGION 1..10: note = Synthetic
TVRRGDLATE

SEQ ID NO: 122 - protein, 10 aa, synthetic construct
  REGION 1..10: note = Synthetic
SVGRGDKADI

SEQ ID NO: 123 - protein, 10 aa, synthetic construct
  REGION 1..10: note = Synthetic
SHNRGDTGTM

SEQ ID NO: 124 - protein, 10 aa, synthetic construct
  REGION 1..10: note = Synthetic
TNTRGDKESV

SEQ ID NO: 125 - protein, 10 aa, synthetic construct
  REGION 1..10: note = Synthetic
SIGRGDQYTI

SEQ ID NO: 126 - protein, 10 aa, synthetic construct
  REGION 1..10: note = Synthetic
QTSRGDAGSW

SEQ ID NO: 127 - protein, 10 aa, synthetic construct
  REGION 1..10: note = Synthetic
AISRGDVQSL

SEQ ID NO: 128 - protein, 10 aa, synthetic construct
  REGION 1..10: note = Synthetic
NAQRGDHGQL

SEQ ID NO: 129 - protein, 10 aa, synthetic construct
  REGION 1..10: note = Synthetic
LNSRGDQASV

SEQ ID NO: 130 - protein, 10 aa, synthetic construct
  REGION 1..10: note = Synthetic
SGNRGDIGTF

SEQ ID NO: 131 - protein, 10 aa, synthetic construct
  REGION 1..10: note = Synthetic
NVGRGDQATM

SEQ ID NO: 132 - protein, 10 aa, synthetic construct
  REGION 1..10: note = Synthetic
SYSRGDTGRL

SEQ ID NO: 133 - protein, 10 aa, synthetic construct
  REGION 1..10: note = Synthetic
SHLRGDQALA

SEQ ID NO: 134 - protein, 10 aa, synthetic construct
  REGION 1..10: note = Synthetic
YFARGDMTMN

SEQ ID NO: 135 - protein, 10 aa, synthetic construct
  REGION 1..10: note = Synthetic
QSQRGDLNPM

SEQ ID NO: 136 - protein, 10 aa, synthetic construct
  REGION 1..10: note = Synthetic
EQRRGDKTEL

SEQ ID NO: 137 - protein, 10 aa, synthetic construct
  REGION 1..10: note = Synthetic
VSARGDAGQL

SEQ ID NO: 138 - protein, 10 aa, synthetic construct
  REGION 1..10: note = Synthetic
EASRGDKGTH

SEQ ID NO: 139 - protein, 10 aa, synthetic construct
  REGION 1..10: note = Synthetic
LSTRGDMGMQ

SEQ ID NO: 140 - protein, 10 aa, synthetic construct
  REGION 1..10: note = Synthetic
ANMRGDQLHT

SEQ ID NO: 141 - protein, 10 aa, synthetic construct
  REGION 1..10: note = Synthetic
ENTRGDLTHA

SEQ ID NO: 142 - protein, 10 aa, synthetic construct
  REGION 1..10: note = Synthetic
IERRGDSAGL

SEQ ID NO: 143 - protein, 10 aa, synthetic construct
  REGION 1..10: note = Synthetic
SAMRGDGVSL

SEQ ID NO: 144 - protein, 10 aa, synthetic construct
  REGION 1..10: note = Synthetic
TVSRGDQGLS

SEQ ID NO: 145 - protein, 10 aa, synthetic construct
  REGION 1..10: note = Synthetic
SIVRGDLNST

SEQ ID NO: 146 - protein, 10 aa, synthetic construct
  REGION 1..10: note = Synthetic
DVARGDKTNF

SEQ ID NO: 147 - protein, 10 aa, synthetic construct
  REGION 1..10: note = Synthetic
WSQRGDLSGT

SEQ ID NO: 148 - protein, 10 aa, synthetic construct
  REGION 1..10: note = Synthetic
LNQRGDVSNM

SEQ ID NO: 149 - protein, 10 aa, synthetic construct
  REGION 1..10: note = Synthetic
AALRGDLSGS

SEQ ID NO: 150 - protein, 10 aa, synthetic construct
  REGION 1..10: note = Synthetic
RVARGDITDI

SEQ ID NO: 151 - protein, 10 aa, synthetic construct
  REGION 1..10: note = Synthetic
STNRGDLNQV

SEQ ID NO: 152 - protein, 10 aa, synthetic construct
  REGION 1..10: note = Synthetic
DSRRGDSVSL

SEQ ID NO: 153 - protein, 10 aa, synthetic construct
  REGION 1..10: note = Synthetic
SVGRGDQSQM

SEQ ID NO: 154 - protein, 10 aa, synthetic construct
  REGION 1..10: note = Synthetic
SNTRGDTNSL

SEQ ID NO: 155 - protein, 10 aa, synthetic construct
  REGION 1..10: note = Synthetic
DNRRGDGTTM

SEQ ID NO: 156 - protein, 10 aa, synthetic construct
  REGION 1..10: note = Synthetic
TPSRGDQGRL

SEQ ID NO: 157 - protein, 10 aa, synthetic construct
  REGION 1..10: note = Synthetic
NYSRGDSMTL

SEQ ID NO: 158 - protein, 10 aa, synthetic construct
  REGION 1..10: note = Synthetic
MQARGDAGTL

SEQ ID NO: 159 - protein, 10 aa, synthetic construct
  REGION 1..10: note = Synthetic
TQSRGDLSGA

SEQ ID NO: 160 - protein, 10 aa, synthetic construct
  REGION 1..10: note = Synthetic
FAQRGDLTGV

SEQ ID NO: 161 - protein, 10 aa, synthetic construct
  REGION 1..10: note = Synthetic
APVRGDLIGT

SEQ ID NO: 162 - protein, 10 aa, synthetic construct
  REGION 1..10: note = Synthetic
EPKRGDLSNT

SEQ ID NO: 163 - protein, 10 aa, synthetic construct
  REGION 1..10: note = Synthetic
SVGRGDTYPL

SEQ ID NO: 164 - protein, 10 aa, synthetic construct
  REGION 1..10: note = Synthetic
QTARGDMTGH

SEQ ID NO: 165 - protein, 10 aa, synthetic construct
  REGION 1..10: note = Synthetic
AGARGDLENR

SEQ ID NO: 166 - protein, 10 aa, synthetic construct
  REGION 1..10: note = Synthetic
MSTRGDLNNV

SEQ ID NO: 167 - protein, 10 aa, synthetic construct
  REGION 1..10: note = Synthetic
EKQRGDLNSM

SEQ ID NO: 168 - protein, 10 aa, synthetic construct
  REGION 1..10: note = Synthetic
IKTRGDLGHE

SEQ ID NO: 169 - protein, 10 aa, synthetic construct
  REGION 1..10: note = Synthetic
IGRRGDMELS

SEQ ID NO: 170 - protein, 10 aa, synthetic construct
  REGION 1..10: note = Synthetic
TTGRGDLKEV

SEQ ID NO: 171 - protein, 10 aa, synthetic construct
  REGION 1..10: note = Synthetic
TDKRGDQNTV

SEQ ID NO: 172 - protein, 10 aa, synthetic construct
  REGION 1..10: note = Synthetic
SNVRGDREAV

SEQ ID NO: 173 - protein, 10 aa, synthetic construct
  REGION 1..10: note = Synthetic
YANRGDLSHQ

SEQ ID NO: 174 - protein, 10 aa, synthetic construct
  REGION 1..10: note = Synthetic
SMMRGDAGQL

SEQ ID NO: 175 - protein, 10 aa, synthetic construct
  REGION 1..10: note = Synthetic
EARRGDSQGL

SEQ ID NO: 176 - protein, 10 aa, synthetic construct
  REGION 1..10: note = Synthetic
MPTRGDQTKF

SEQ ID NO: 177 - protein, 10 aa, synthetic construct
  REGION 1..10: note = Synthetic
AEGRGDQYTR

SEQ ID NO: 178 - protein, 10 aa, synthetic construct
  REGION 1..10: note = Synthetic
GPGRGDQTTL

SEQ ID NO: 179 - protein, 10 aa, synthetic construct
  REGION 1..10: note = Synthetic
ATGRGDLGQA

SEQ ID NO: 180 - protein, 10 aa, synthetic construct
  REGION 1..10: note = Synthetic
AVARGDQGLI

SEQ ID NO: 181 - DNA, 30 bp, synthetic construct
  misc_feature 1..30: note = Synthetic
  source 1..30: mol_type = other DNA
gctgagggtagaggagaccagtatactcgt

SEQ ID NO: 182 - DNA, 30 bp, synthetic construct
  misc_feature 1..30: note = Synthetic
  source 1..30: mol_type = other DNA
gggccgggtagaggagaccagactacgttg

SEQ ID NO: 183 - DNA, 30 bp, synthetic construct
  misc_feature 1..30: note = Synthetic
  source 1..30: mol_type = other DNA
gcggaaggcagaggagaccaatacacaagg

SEQ ID NO: 184 - DNA, 30 bp, synthetic construct
  misc_feature 1..30: note = Synthetic
  source 1..30: mol_type = other DNA
gcgactggtagaggagacctgggtcaggct

SEQ ID NO: 185 - DNA, 30 bp, synthetic construct
  misc_feature 1..30: note = Synthetic
  source 1..30: mol_type = other DNA
gcggtggcgagaggagaccagggtcttatt

SEQ ID NO: 186 - DNA, 30 bp, synthetic construct
  misc_feature 1..30: note = Synthetic
  source 1..30: mol_type = other DNA
aacatctccagaggagaccaaggttaccaa

SEQ ID NO: 187 - DNA, 30 bp, synthetic construct
  misc_feature 1..30: note = Synthetic
  source 1..30: mol_type = other DNA
gcgccggctagaggagaccaggggagtcag

SEQ ID NO: 188 - DNA, 30 bp, synthetic construct
  misc_feature 1..30: note = Synthetic
  source 1..30: mol_type = other DNA
gccgttagcagaggagaccggatggaattc

SEQ ID NO: 189 - DNA, 30 bp, synthetic construct
  misc_feature 1..30: note = Synthetic
  source 1..30: mol_type = other DNA
cagatgggtagaggagacatggggattaag

SEQ ID NO: 190 - DNA, 30 bp, synthetic construct
  misc_feature 1..30: note = Synthetic
  source 1..30: mol_type = other DNA
gagtatcggagaggagacaaggcggatatt

SEQ ID NO: 191 - DNA, 30 bp, synthetic construct
  misc_feature 1..30: note = Synthetic
  source 1..30: mol_type = other DNA
gagagtcggagaggagacaaggagccgctg

SEQ ID NO: 192 - DNA, 30 bp, synthetic construct
  misc_feature 1..30: note = Synthetic
  source 1..30: mol_type = other DNA
gcacacatgagaggagacctaggcggcacg

SEQ ID NO: 193 - DNA, 30 bp, synthetic construct
  misc_feature 1..30: note = Synthetic
  source 1..30: mol_type = other DNA
gtgtggcaaagaggagacaaaatggacatg

SEQ ID NO: 194 - DNA, 30 bp, synthetic construct
  misc_feature 1..30: note = Synthetic
  source 1..30: mol_type = other DNA
tctattgggagaggagacacgggtcatatg

SEQ ID NO: 195 - DNA, 30 bp, synthetic construct
  misc_feature 1..30: note = Synthetic
  source 1..30: mol_type = other DNA
aatattgctagaggagacgctggtcagtat

SEQ ID NO: 196 - DNA, 30 bp, synthetic construct
  misc_feature 1..30: note = Synthetic
  source 1..30: mol_type = other DNA
gcagtagcaagaggagaccaaggcttaatc

SEQ ID NO: 197 - DNA, 30 bp, synthetic construct
  misc_feature 1..30: note = Synthetic
  source 1..30: mol_type = other DNA
tcggtctcgagaggagaccaaggattgcac

SEQ ID NO: 198 - DNA, 30 bp, synthetic construct
  misc_feature 1..30: note = Synthetic
  source 1..30: mol_type = other DNA
gaatacaggagaggagacaaagcagacatc

SEQ ID NO: 199 - DNA, 30 bp, synthetic construct
  misc_feature 1..30: note = Synthetic
  source 1..30: mol_type = other DNA
gcgcatatgagaggagacttgggggggact

SEQ ID NO: 200 - DNA, 30 bp, synthetic construct
  misc_feature 1..30: note = Synthetic
  source 1..30: mol_type = other DNA
cagattggtagaggagacattactcatggg

SEQ ID NO: 201 - DNA, 30 bp, synthetic construct
  misc_feature 1..30: note = Synthetic
  source 1..30: mol_type = other DNA
gaagtcagaagaggagacttgcacgggaca

SEQ ID NO: 202 - DNA, 30 bp, synthetic construct
  misc_feature 1..30: note = Synthetic
  source 1..30: mol_type = other DNA
agtgtctcaagaggagacgtgcacacgatg

SEQ ID NO: 203 - DNA, 30 bp, synthetic construct
  misc_feature 1..30: note = Synthetic
  source 1..30: mol_type = other DNA
atggtgactagaggagaccttggtacgcgg

SEQ ID NO: 204 - DNA, 30 bp, synthetic construct
  misc_feature 1..30: note = Synthetic
  source 1..30: mol_type = other DNA
aacggcgggagaggagacacgacgcacttc

SEQ ID NO: 205 - DNA, 30 bp, synthetic construct
  misc_feature 1..30: note = Synthetic
  source 1..30: mol_type = other DNA
acgatggggagaggagacatgaattcgctt

SEQ ID NO: 206 - DNA, 30 bp, synthetic construct
  misc_feature 1..30: note = Synthetic
  source 1..30: mol_type = other DNA
gcgattagtagaggagaccagggtctttct

SEQ ID NO: 207 - DNA, 30 bp, synthetic construct
  misc_feature 1..30: note = Synthetic
  source 1..30: mol_type = other DNA
aacgacgcaagaggagacaaatccacatac

SEQ ID NO: 208 - DNA, 30 bp, synthetic construct
  misc_feature 1..30: note = Synthetic
  source 1..30: mol_type = other DNA
gtggggctgagaggagacttgacgggttcg

SEQ ID NO: 209 - DNA, 30 bp, synthetic construct
  misc_feature 1..30: note = Synthetic
  source 1..30: mol_type = other DNA
gagatgaggagaggagacctggggacgagt

SEQ ID NO: 210 - DNA, 30 bp, synthetic construct
  misc_feature 1..30: note = Synthetic
  source 1..30: mol_type = other DNA
gcgatgagtagaggagacatggggatggcg

SEQ ID NO: 211 - DNA, 30 bp, synthetic construct
  misc_feature 1..30: note = Synthetic
  source 1..30: mol_type = other DNA
gcaacgggcagaggagacttaggccaagca

SEQ ID NO: 212 - DNA, 30 bp, synthetic construct
  misc_feature 1..30: note = Synthetic
  source 1..30: mol_type = other DNA
aacgtagcaagaggagaccaagttaactac

SEQ ID NO: 213 - DNA, 30 bp, synthetic construct
  misc_feature 1..30: note = Synthetic
  source 1..30: mol_type = other DNA
agcatcggaagaggagacaccggccacatg

SEQ ID NO: 214 - DNA, 30 bp, synthetic construct
  misc_feature 1..30: note = Synthetic
  source 1..30: mol_type = other DNA
gcatccgtaagaggagacctatcaggctca

SEQ ID NO: 215 - DNA, 30 bp, synthetic construct
  misc_feature 1..30: note = Synthetic
  source 1..30: mol_type = other DNA
agcgccgcgagaggagacactgaacggcta

SEQ ID NO: 216 - DNA, 30 bp, synthetic construct
  misc_feature 1..30: note = Synthetic
  source 1..30: mol_type = other DNA
gccatgtcaagaggagacatgggtatggct

SEQ ID NO: 217 - DNA, 30 bp, synthetic construct
  misc_feature 1..30: note = Synthetic
  source 1..30: mol_type = other DNA
agtccatcgagaggagaccaaggacgcact

SEQ ID NO: 218 - DNA, 30 bp, synthetic construct
  misc_feature 1..30: note = Synthetic
  source 1..30: mol_type = other DNA
gtgcctgggagaggagaccttaatactatg

SEQ ID NO: 219 - DNA, 30 bp, synthetic construct
  misc_feature 1..30: note = Synthetic
  source 1..30: mol_type = other DNA
ggtcctgggagaggagaccaaacgaccctt

SEQ ID NO: 220 - DNA, 30 bp, synthetic construct
  misc_feature 1..30: note = Synthetic
  source 1..30: mol_type = other DNA
acatcggtcagaggagaccacggaacattg

SEQ ID NO: 221 - DNA, 30 bp, synthetic construct
  misc_feature 1..30: note = Synthetic
  source 1..30: mol_type = other DNA
acgccttcgagaggagaccttgggcagact

SEQ ID NO: 222 - DNA, 30 bp, synthetic construct
  misc_feature 1..30: note = Synthetic
  source 1..30: mol_type = other DNA
gctggacacagaggagacacaggagtcatc

SEQ ID NO: 223 - DNA, 30 bp, synthetic construct
  misc_feature 1..30: note = Synthetic
  source 1..30: mol_type = other DNA
gcgccggcgagaggagaccagggtagtatg

SEQ ID NO: 224 - DNA, 30 bp, synthetic construct
  misc_feature 1..30: note = Synthetic
  source 1..30: mol_type = other DNA
atgtcgttgagaggagacttgaatgggtcg

SEQ ID NO: 225 - DNA, 30 bp, synthetic construct
  misc_feature 1..30: note = Synthetic
  source 1..30: mol_type = other DNA
gaggctaagagaggagacgtgcattctatt

SEQ ID NO: 226 - DNA, 30 bp, synthetic construct
  misc_feature 1..30: note = Synthetic
  source 1..30: mol_type = other DNA
agtgctcagagaggagacgtgcaggcggtg

SEQ ID NO: 227 - DNA, 30 bp, synthetic construct
  misc_feature 1..30: note = Synthetic
  source 1..30: mol_type = other DNA
agtacggcgagaggagaccagggggatagg

SEQ ID NO: 228 - DNA, 30 bp, synthetic construct
  misc_feature 1..30: note = Synthetic
  source 1..30: mol_type = other DNA
cagattagtagaggagacctggggattaat

SEQ ID NO: 229 - DNA, 30 bp, synthetic construct
  misc_feature 1..30: note = Synthetic
  source 1..30: mol_type = other DNA
acgttcacaagaggagacatgacgatgaac

SEQ ID NO: 230 - DNA, 30 bp, synthetic construct
  misc_feature 1..30: note = Synthetic
  source 1..30: mol_type = other DNA
caagaaggaagaggagacctgaacatgagg

SEQ ID NO: 231 - DNA, 30 bp, synthetic construct
  misc_feature 1..30: note = Synthetic
  source 1..30: mol_type = other DNA
gcacacgcaagaggagacaccagctccctg

SEQ ID NO: 232 - DNA, 30 bp, synthetic construct
  misc_feature 1..30: note = Synthetic
  source 1..30: mol_type = other DNA
acgaatgggagaggagacgctgggactctg

SEQ ID NO: 233 - DNA, 30 bp, synthetic construct
  misc_feature 1..30: note = Synthetic
  source 1..30: mol_type = other DNA
gctttcggcagaggagaccaagggcaacta

SEQ ID NO: 234 - DNA, 30 bp, synthetic construct
  misc_feature 1..30: note = Synthetic
  source 1..30: mol_type = other DNA
gctgatgggagaggagaccgttcgtctctg

SEQ ID NO: 235 - DNA, 30 bp, synthetic construct
  misc_feature 1..30: note = Synthetic
  source 1..30: mol_type = other DNA
gacggacgcagaggagacggacacagcctt

SEQ ID NO: 236 - DNA, 30 bp, synthetic construct
  misc_feature 1..30: note = Synthetic
  source 1..30: mol_type = other DNA
gagaagttgagaggagaccttcattcgact

SEQ ID NO: 237 - DNA, 30 bp, synthetic construct
  misc_feature 1..30: note = Synthetic
  source 1..30: mol_type = other DNA
gaggcgcgtagaggagacgcttcggcgatg

SEQ ID NO: 238 - DNA, 30 bp, synthetic construct
  misc_feature 1..30: note = Synthetic
  source 1..30: mol_type = other DNA
atgggaacgagaggagacaaaatggacttc

SEQ ID NO: 239 - DNA, 30 bp, synthetic construct
  misc_feature 1..30: note = Synthetic
  source 1..30: mol_type = other DNA
tcgacttcgagaggagaccgggagtcgtat

SEQ ID NO: 240 - DNA, 30 bp, synthetic construct
  misc_feature 1..30: note = Synthetic
  source 1..30: mol_type = other DNA
tgtcagccgagaggagacacgactcggtgt

SEQ ID NO: 241 - DNA, 30 bp, synthetic construct
  misc_feature 1..30: note = Synthetic
  source 1..30: mol_type = other DNA
atgcacacgagaggagacaaaatggacttc

SEQ ID NO: 242 - DNA, 30 bp, synthetic construct
  misc_feature 1..30: note = Synthetic
  source 1..30: mol_type = other DNA
tacagtgccagaggagacacaagtggcctg

SEQ ID NO: 243 - DNA, 30 bp, synthetic construct
  misc_feature 1..30: note = Synthetic
  source 1..30: mol_type = other DNA
tcgacgatgagaggagaccatgagaagttg

SEQ ID NO: 244 - DNA, 30 bp, synthetic construct
  misc_feature 1..30: note = Synthetic
  source 1..30: mol_type = other DNA
acccaaatgagaggagacggggtcacacta

SEQ ID NO: 245 - DNA, 30 bp, synthetic construct
  misc_feature 1..30: note = Synthetic
  source 1..30: mol_type = other DNA
actactcgtagaggagacatgggggataat

SEQ ID NO: 246 - DNA, 30 bp, synthetic construct
  misc_feature 1..30: note = Synthetic
  source 1..30: mol_type = other DNA
gcgaatggtagaggagacaggctggagttg

SEQ ID NO: 247 - DNA, 30 bp, synthetic construct
  misc_feature 1..30: note = Synthetic
  source 1..30: mol_type = other DNA
gctgtgtctagaggagacaggatggagttt

SEQ ID NO: 248 - DNA, 30 bp, synthetic construct
  misc_feature 1..30: note = Synthetic
  source 1..30: mol_type = other DNA
gagaatcagagaggagacttgtcgggtcgg

SEQ ID NO: 249 - DNA, 30 bp, synthetic construct
  misc_feature 1..30: note = Synthetic
  source 1..30: mol_type = other DNA
tcgactggtagaggagacctggggcaggct

SEQ ID NO: 250 - DNA, 30 bp, synthetic construct
  misc_feature 1..30: note = Synthetic
  source 1..30: mol_type = other DNA
atgcatactagaggagacaagatggatttt

SEQ ID NO: 251 - DNA, 30 bp, synthetic construct
  misc_feature 1..30: note = Synthetic
  source 1..30: mol_type = other DNA
agtagtgcgagaggagactatagtgaggtg

SEQ ID NO: 252 - DNA, 30 bp, synthetic construct
  misc_feature 1..30: note = Synthetic
  source 1..30: mol_type = other DNA
gcgtttgggagaggagaccagggtcagctt

SEQ ID NO: 253 - DNA, 30 bp, synthetic construct
  misc_feature 1..30: note = Synthetic
  source 1..30: mol_type = other DNA
agtacggcgagaggagacgcggcgacttat

SEQ ID NO: 254 - DNA, 30 bp, synthetic construct
  misc_feature 1..30: note = Synthetic
  source 1..30: mol_type = other DNA
gtcaacacaagaggagacactcaaaaactt

SEQ ID NO: 255 - DNA, 30 bp, synthetic construct
  misc_feature 1..30: note = Synthetic
  source 1..30: mol_type = other DNA
gcgatgagtagaggagaccatgcgtcgctt

SEQ ID NO: 256 - DNA, 30 bp, synthetic construct
  misc_feature 1..30: note = Synthetic
  source 1..30: mol_type = other DNA
caggctgctagaggagacgttaataagctg

SEQ ID NO: 257 - DNA, 30 bp, synthetic construct
  misc_feature 1..30: note = Synthetic
  source 1..30: mol_type = other DNA
aggggtacgagaggagacacggttgagttg

SEQ ID NO: 258 - DNA, 30 bp, synthetic construct
  misc_feature 1..30: note = Synthetic
  source 1..30: mol_type = other DNA
accacccggagaggagacatgggagacaac

SEQ ID NO: 259 - DNA, 30 bp, synthetic construct
  misc_feature 1..30: note = Synthetic
  source 1..30: mol_type = other DNA
gctagtacgagaggagactatgcgggtgtt

SEQ ID NO: 260 - DNA, 30 bp, synthetic construct
  misc_feature 1..30: note = Synthetic
  source 1..30: mol_type = other DNA
gacgacaggagaggagacaaactgcccctt

SEQ ID NO: 261 - DNA, 30 bp, synthetic construct
  misc_feature 1..30: note = Synthetic
  source 1..30: mol_type = other DNA
tcggggtcgagaggagacctgaatgcggtg

SEQ ID NO: 262 - DNA, 30 bp, synthetic construct
  misc_feature 1..30: note = Synthetic
  source 1..30: mol_type = other DNA
gagtataggagaggagaccagcagattcag

SEQ ID NO: 263 - DNA, 30 bp, synthetic construct
  misc_feature 1..30: note = Synthetic
  source 1..30: mol_type = other DNA
acgtacgtcagaggagacagagcagaagtg

SEQ ID NO: 264 - DNA, 30 bp, synthetic construct
  misc_feature 1..30: note = Synthetic
  source 1..30: mol_type = other DNA
caatcactaagaggagacttgaacggatcc

SEQ ID NO: 265 - DNA, 30 bp, synthetic construct
  misc_feature 1..30: note = Synthetic
  source 1..30: mol_type = other DNA
gagggtcggagaggagacacgacgtcgttg

SEQ ID NO: 266 - DNA, 30 bp, synthetic construct
  misc_feature 1..30: note = Synthetic
  source 1..30: mol_type = other DNA
gcggagaatagaggagaccggtcgagtttg

SEQ ID NO: 267 - DNA, 30 bp, synthetic construct
  misc_feature 1..30: note = Synthetic
  source 1..30: mol_type = other DNA
gtggctgggagaggagaccgtagtgagctg

SEQ ID NO: 268 - DNA, 30 bp, synthetic construct
  misc_feature 1..30: note = Synthetic
  source 1..30: mol_type = other DNA
gatccggcgagaggagacattggtgcgcgt

SEQ ID NO: 269 - DNA, 30 bp, synthetic construct
  misc_feature 1..30: note = Synthetic
  source 1..30: mol_type = other DNA
gaaatgcgcagaggagacttgggaacttca

SEQ ID NO: 270 - DNA, 30 bp, synthetic construct
  misc_feature 1..30: note = Synthetic
  source 1..30: mol_type = other DNA
gtttggcagagaggagacaagatggatatg

SEQ ID NO: 271 - DNA, 30 bp, synthetic construct
  misc_feature 1..30: note = Synthetic
  source 1..30: mol_type = other DNA
gtgattgggagaggagacaaggcgcttcag

SEQ ID NO: 272 - DNA, 30 bp, synthetic construct
  misc_feature 1..30: note = Synthetic
  source 1..30: mol_type = other DNA
agcttcgaaagaggagacaaaaactctctt

SEQ ID NO: 273 - DNA, 30 bp, synthetic construct
  misc_feature 1..30: note = Synthetic
  source 1..30: mol_type = other DNA
cagattgctagaggagacattgctagtgtg

SEQ ID NO: 274 - DNA, 30 bp, synthetic construct
  misc_feature 1..30: note = Synthetic
  source 1..30: mol_type = other DNA
acgattagtagaggagacctgggtggggct

SEQ ID NO: 275 - DNA, 30 bp, synthetic construct
  misc_feature 1..30: note = Synthetic
  source 1..30: mol_type = other DNA
gcgatgattagaggagacatgacgcatagt

SEQ ID NO: 276 - DNA, 30 bp, synthetic construct
  misc_feature 1..30: note = Synthetic
  source 1..30: mol_type = other DNA
acgagtgtgagaggagaccatgggacgctg

SEQ ID NO: 277 - DNA, 30 bp, synthetic construct
  misc_feature 1..30: note = Synthetic
  source 1..30: mol_type = other DNA
acgatgcggagaggagacctgaatgatagt

SEQ ID NO: 278 - DNA, 30 bp, synthetic construct
  misc_feature 1..30: note = Synthetic
  source 1..30: mol_type = other DNA
gcctactccagaggagacctaggcaaccac

SEQ ID NO: 279 - DNA, 30 bp, synthetic construct
  misc_feature 1..30: note = Synthetic
  source 1..30: mol_type = other DNA
gaggagcggagaggagacactcatcggctg

SEQ ID NO: 280 - DNA, 30 bp, synthetic construct
  misc_feature 1..30: note = Synthetic
  source 1..30: mol_type = other DNA
tcacaactaagaggagacgcggggacaatc

SEQ ID NO: 281 - DNA, 30 bp, synthetic construct
  misc_feature 1..30: note = Synthetic
  source 1..30: mol_type = other DNA
gcgatggtgagaggagacgcgcatcagctg

SEQ ID NO: 282 - DNA, 30 bp, synthetic construct
  misc_feature 1..30: note = Synthetic
  source 1..30: mol_type = other DNA
acgactagtagaggagacttgaattcggtt

SEQ ID NO: 283 - DNA, 30 bp, synthetic construct
  misc_feature 1..30: note = Synthetic
  source 1..30: mol_type = other DNA
tgggagcagagaggagacatgattgggaag

SEQ ID NO: 284 - DNA, 30 bp, synthetic construct
  misc_feature 1..30: note = Synthetic
  source 1..30: mol_type = other DNA
tacaccaccagaggagacctccaatcaaac

SEQ ID NO: 285 - DNA, 30 bp, synthetic construct
  misc_feature 1..30: note = Synthetic
  source 1..30: mol_type = other DNA
atgtcgcagagaggagacctttcgcatcag

SEQ ID NO: 286 - DNA, 30 bp, synthetic construct
  misc_feature 1..30: note = Synthetic
  source 1..30: mol_type = other DNA
gcgagtactagaggagacacgacgcatatg

SEQ ID NO: 287 - DNA, 30 bp, synthetic construct
  misc_feature 1..30: note = Synthetic
  source 1..30: mol_type = other DNA
tcagacaccagaggagacacccacagactg

SEQ ID NO: 288 - DNA, 30 bp, synthetic construct
  misc_feature 1..30: note = Synthetic
  source 1..30: mol_type = other DNA
acgctgggtagaggagaccagtatacgagt

SEQ ID NO: 289 - DNA, 30 bp, synthetic construct
  misc_feature 1..30: note = Synthetic
  source 1..30: mol_type = other DNA
tcgtatgcgagaggagacgttagggaggtt

SEQ ID NO: 290 - DNA, 30 bp, synthetic construct
  misc_feature 1..30: note = Synthetic
  source 1..30: mol_type = other DNA
gagactcgtagaggagacctgagtcagaat

SEQ ID NO: 291 - DNA, 30 bp, synthetic construct
  misc_feature 1..30: note = Synthetic
  source 1..30: mol_type = other DNA
acaatcgggagaggagacctgatggacaaa

SEQ ID NO: 292 - DNA, 30 bp, synthetic construct
  misc_feature 1..30: note = Synthetic
  source 1..30: mol_type = other DNA
agttacaccagaggagaccttagccaaaac

SEQ ID NO: 293 - DNA, 30 bp, synthetic construct
  misc_feature 1..30: note = Synthetic
  source 1..30: mol_type = other DNA
tcgaagctgagaggagacgctagtgagatt

SEQ ID NO: 294 - DNA, 30 bp, synthetic construct
  misc_feature 1..30: note = Synthetic
  source 1..30: mol_type = other DNA
tcgatggcgagaggagacaaggcggagatt

SEQ ID NO: 295 - DNA, 30 bp, synthetic construct
  misc_feature 1..30: note = Synthetic
  source 1..30: mol_type = other DNA
ggagccgtcagaggagaccactcatcgtta

SEQ ID NO: 296 - DNA, 30 bp, synthetic construct
  misc_feature 1..30: note = Synthetic
  source 1..30: mol_type = other DNA
atggagacgagaggagacatgagtaatcgt

SEQ ID NO: 297 - DNA, 30 bp, synthetic construct
  misc_feature 1..30: note = Synthetic
  source 1..30: mol_type = other DNA
gcgtacacaagaggagacaaagacgcacta

SEQ ID NO: 298 - DNA, 30 bp, synthetic construct
  misc_feature 1..30: note = Synthetic
  source 1..30: mol_type = other DNA
gagaatcggagaggagacattacgcagtcg

SEQ ID NO: 299 - DNA, 30 bp, synthetic construct
  misc_feature 1..30: note = Synthetic
  source 1..30: mol_type = other DNA
tccacgggcagaggagaccttggacaagca

SEQ ID NO: 300 - DNA, 30 bp, synthetic construct
  misc_feature 1..30: note = Synthetic
  source 1..30: mol_type = other DNA
ggtgctgttagaggagaccatagtagtctt

SEQ ID NO: 301 - DNA, 30 bp, synthetic construct
  misc_feature 1..30: note = Synthetic
  source 1..30: mol_type = other DNA
tctcagcttagaggagacgctggtacgatt

SEQ ID NO: 302 - DNA, 30 bp, synthetic construct
  misc_feature 1..30: note = Synthetic
  source 1..30: mol_type = other DNA
atgctcctaagaggagacaaaaacgacttc

SEQ ID NO: 303 - DNA, 30 bp, synthetic construct
  misc_feature 1..30: note = Synthetic
  source 1..30: mol_type = other DNA
aaggtgcagagaggagacgcgagtgattgg

SEQ ID NO: 304 - DNA, 30 bp, synthetic construct
  misc_feature 1..30: note = Synthetic
  source 1..30: mol_type = other DNA
gcgtttacgagaggagacatgcagactgct

SEQ ID NO: 305 - DNA, 30 bp, synthetic construct
  misc_feature 1..30: note = Synthetic
  source 1..30: mol_type = other DNA
cagcctaagagaggagacgttcaggctcag

SEQ ID NO: 306 - DNA, 30 bp, synthetic construct
  misc_feature 1..30: note = Synthetic
  source 1..30: mol_type = other DNA
gctagtctgagaggagacatgggggtgagt

SEQ ID NO: 307 - DNA, 30 bp, synthetic construct
  misc_feature 1..30: note = Synthetic
  source 1..30: mol_type = other DNA
gcctactccagaggagacaaagaatcgttc

SEQ ID NO: 308 - DNA, 30 bp, synthetic construct
  misc_feature 1..30: note = Synthetic
  source 1..30: mol_type = other DNA
cggttccaaagaggagacttgaccgacgct

SEQ ID NO: 309 - DNA, 30 bp, synthetic construct
  misc_feature 1..30: note = Synthetic
  source 1..30: mol_type = other DNA
tctgatgctagaggagacacgatgaagctg

SEQ ID NO: 310 - DNA, 30 bp, synthetic construct
  misc_feature 1..30: note = Synthetic
  source 1..30: mol_type = other DNA
agcggggccagaggagacacagtaagtctc

SEQ ID NO: 311 - DNA, 30 bp, synthetic construct
  misc_feature 1..30: note = Synthetic
  source 1..30: mol_type = other DNA
gatgagaagagaggagaccagaagcatctt

SEQ ID NO: 312 - DNA, 30 bp, synthetic construct
  misc_feature 1..30: note = Synthetic
  source 1..30: mol_type = other DNA
aacggagtaagaggagacgtccaaaacttc

SEQ ID NO: 313 - DNA, 30 bp, synthetic construct
  misc_feature 1..30: note = Synthetic
  source 1..30: mol_type = other DNA
atgacgttgagaggagacctgggtgggtcg

SEQ ID NO: 314 - DNA, 30 bp, synthetic construct
  misc_feature 1..30: note = Synthetic
  source 1..30: mol_type = other DNA
gaggctaggagaggagacgctagtgcgatg

SEQ ID NO: 315 - DNA, 30 bp, synthetic construct
  misc_feature 1..30: note = Synthetic
  source 1..30: mol_type = other DNA
gggcaggagagaggagacctggggactcgg

SEQ ID NO: 316 - DNA, 30 bp, synthetic construct
  misc_feature 1..30: note = Synthetic
  source 1..30: mol_type = other DNA
agaggcgccagaggagacctagtcgacgct

SEQ ID NO: 317 - DNA, 30 bp, synthetic construct
  misc_feature 1..30: note = Synthetic
  source 1..30: mol_type = other DNA
caatactccagaggagaccacaccgacctt

SEQ ID NO: 318 - DNA, 30 bp, synthetic construct
  misc_feature 1..30: note = Synthetic
  source 1..30: mol_type = other DNA
atgaacaccagaggagacgtgcacgctatg

SEQ ID NO: 319 - DNA, 30 bp, synthetic construct
  misc_feature 1..30: note = Synthetic
  source 1..30: mol_type = other DNA
acggtacggagaggagacctagcaaccgaa

SEQ ID NO: 320 - DNA, 30 bp, synthetic construct
  misc_feature 1..30: note = Synthetic
  source 1..30: mol_type = other DNA
aatattgcgagaggagacgctggtcagtat

SEQ ID NO: 321 - DNA, 30 bp, synthetic construct
  misc_feature 1..30: note = Synthetic
  source 1..30: mol_type = other DNA
tctgttgggagaggagacaaggctgatatt

SEQ ID NO: 322 - DNA, 30 bp, synthetic construct
  misc_feature 1..30: note = Synthetic
  source 1..30: mol_type = other DNA
tcacacaacagaggagacaccggaaccatg

SEQ ID NO: 323 - DNA, 30 bp, synthetic construct
  misc_feature 1..30: note = Synthetic
  source 1..30: mol_type = other DNA
acgaacaccagaggagacaaagaatcagta

SEQ ID NO: 324 - DNA, 30 bp, synthetic construct
  misc_feature 1..30: note = Synthetic
  source 1..30: mol_type = other DNA
tcgattggtagaggagaccagtatacgatt

SEQ ID NO: 325 - DNA, 30 bp, synthetic construct
  misc_feature 1..30: note = Synthetic
  source 1..30: mol_type = other DNA
cagacgagtagaggagacgcggggtcttgg

SEQ ID NO: 326 - DNA, 30 bp, synthetic construct
  misc_feature 1..30: note = Synthetic
  source 1..30: mol_type = other DNA
gctgaaaacagaggagaccgaagcagccta

SEQ ID NO: 327 - DNA, 30 bp, synthetic construct
  misc_feature 1..30: note = Synthetic
  source 1..30: mol_type = other DNA
gcgatttcgagaggagacgttcagtcgttg

SEQ ID NO: 328 - DNA, 30 bp, synthetic construct
  misc_feature 1..30: note = Synthetic
  source 1..30: mol_type = other DNA
aacgcacaaagaggagaccacgggcaactg

SEQ ID NO: 329 - DNA, 30 bp, synthetic construct
  misc_feature 1..30: note = Synthetic
  source 1..30: mol_type = other DNA
ctcaactcgagaggagaccaagcctccgtc

SEQ ID NO: 330 - DNA, 30 bp, synthetic construct
  misc_feature 1..30: note = Synthetic
  source 1..30: mol_type = other DNA
tcgggaaacagaggagacataggtacattc

SEQ ID NO: 331 - DNA, 30 bp, synthetic construct
  misc_feature 1..30: note = Synthetic
  source 1..30: mol_type = other DNA
aacgtgggaagaggagaccaagccacaatg

SEQ ID NO: 332 - DNA, 30 bp, synthetic construct
  misc_feature 1..30: note = Synthetic
  source 1..30: mol_type = other DNA
tcgtattctagaggagacactggtcggctt

SEQ ID NO: 333 - DNA, 30 bp, synthetic construct
  misc_feature 1..30: note = Synthetic
  source 1..30: mol_type = other DNA
agccacttaagaggagaccaagcgttggcc

SEQ ID NO: 334 - DNA, 30 bp, synthetic construct
  misc_feature 1..30: note = Synthetic
  source 1..30: mol_type = other DNA
tacttcgccagaggagacatgactatgaac

SEQ ID NO: 335 - DNA, 30 bp, synthetic construct
  misc_feature 1..30: note = Synthetic
  source 1..30: mol_type = other DNA
cagtcgcagagaggagaccttaatcctatg

SEQ ID NO: 336 - DNA, 30 bp, synthetic construct
  misc_feature 1..30: note = Synthetic
  source 1..30: mol_type = other DNA
gagcagaggagaggagacaagacggagctg

SEQ ID NO: 337 - DNA, 30 bp, synthetic construct
  misc_feature 1..30: note = Synthetic
  source 1..30: mol_type = other DNA
gtgtctgcgagaggagacgcgggtcagttg

SEQ ID NO: 338 - DNA, 30 bp, synthetic construct
  misc_feature 1..30: note = Synthetic
  source 1..30: mol_type = other DNA
tctccgtctagaggagaccaggggcggacg

SEQ ID NO: 339 - DNA, 30 bp, synthetic construct
  misc_feature 1..30: note = Synthetic
  source 1..30: mol_type = other DNA
gaggctagtagaggagacaagggtacgcat

SEQ ID NO: 340 - DNA, 30 bp, synthetic construct
  misc_feature 1..30: note = Synthetic
  source 1..30: mol_type = other DNA
ctgtctactagaggagacatgggtatgcag

SEQ ID NO: 341 - DNA, 30 bp, synthetic construct
  misc_feature 1..30: note = Synthetic
  source 1..30: mol_type = other DNA
gcgaatatgagaggagaccagctgcatact

SEQ ID NO: 342 - DNA, 30 bp, synthetic construct
  misc_feature 1..30: note = Synthetic
  source 1..30: mol_type = other DNA
gagaatacgagaggagaccttactcatgcg

SEQ ID NO: 343 - DNA, 30 bp, synthetic construct
  misc_feature 1..30: note = Synthetic
  source 1..30: mol_type = other DNA
attgagcgtagaggagactcggcggggctg

SEQ ID NO: 344 - DNA, 30 bp, synthetic construct
  misc_feature 1..30: note = Synthetic
  source 1..30: mol_type = other DNA
agtgcgatgagaggagacggagtgagcttg

SEQ ID NO: 345 - DNA, 30 bp, synthetic construct
  misc_feature 1..30: note = Synthetic
  source 1..30: mol_type = other DNA
acggtttcgagaggagaccaggggttgtct

SEQ ID NO: 346 - DNA, 30 bp, synthetic construct
  misc_feature 1..30: note = Synthetic
  source 1..30: mol_type = other DNA
tcgatcgtcagaggagacctgaactccacg

SEQ ID NO: 347 - DNA, 30 bp, synthetic construct
  misc_feature 1..30: note = Synthetic
  source 1..30: mol_type = other DNA
gacgtagcgagaggagacaaaacaaacttc

SEQ ID NO: 348 - DNA, 30 bp, synthetic construct
  misc_feature 1..30: note = Synthetic
  source 1..30: mol_type = other DNA
tggagccaaagaggagacctgagtggaacc

SEQ ID NO: 349 - DNA, 30 bp, synthetic construct
  misc_feature 1..30: note = Synthetic
  source 1..30: mol_type = other DNA
ctgaaccaaagaggagacgtttccaacatg

SEQ ID NO: 350 - DNA, 30 bp, synthetic construct
  misc_feature 1..30: note = Synthetic
  source 1..30: mol_type = other DNA
gccgccctaagaggagacctatccggctca

SEQ ID NO: 351 - DNA, 30 bp, synthetic construct
  misc_feature 1..30: note = Synthetic
  source 1..30: mol_type = other DNA
agggttgcgagaggagacattacggatatt

SEQ ID NO: 352 - DNA, 30 bp, synthetic construct
  misc_feature 1..30: note = Synthetic
  source 1..30: mol_type = other DNA
tcgacgaacagaggagacctcaaccaagtt

SEQ ID NO: 353 - DNA, 30 bp, synthetic construct
  misc_feature 1..30: note = Synthetic
  source 1..30: mol_type = other DNA
gattcgcggagaggagactctgtgagtctt

SEQ ID NO: 354 - DNA, 30 bp, synthetic construct
  misc_feature 1..30: note = Synthetic
  source 1..30: mol_type = other DNA
agtgttgggagaggagaccagtctcagatg

SEQ ID NO: 355 - DNA, 30 bp, synthetic construct
  misc_feature 1..30: note = Synthetic
  source 1..30: mol_type = other DNA
tccaacacgagaggagacacaaactcccta

SEQ ID NO: 356 - DNA, 30 bp, synthetic construct
  misc_feature 1..30: note = Synthetic
  source 1..30: mol_type = other DNA
gataatcggagaggagacggtacgactatg

SEQ ID NO: 357 - DNA, 30 bp, synthetic construct
  misc_feature 1..30: note = Synthetic
  source 1..30: mol_type = other DNA
acgccttcgagaggagaccaaggaagacta

SEQ ID NO: 358 - DNA, 30 bp, synthetic construct
  misc_feature 1..30: note = Synthetic
  source 1..30: mol_type = other DNA
aactacagcagaggagactcaatgacgctt

SEQ ID NO: 359 - DNA, 30 bp, synthetic construct
  misc_feature 1..30: note = Synthetic
  source 1..30: mol_type = other DNA
atgcaggctagaggagacgctgggactctg

SEQ ID NO: 360 - DNA, 30 bp, synthetic construct
  misc_feature 1..30: note = Synthetic
  source 1..30: mol_type = other DNA
acgcagtcgagaggagacttgtctggtgcg

SEQ ID NO: 361 - DNA, 30 bp, synthetic construct
  misc_feature 1..30: note = Synthetic
  source 1..30: mol_type = other DNA
tttgcgcagagaggagacttgactggggtt

SEQ ID NO: 362 - DNA, 30 bp, synthetic construct
  misc_feature 1..30: note = Synthetic
  source 1..30: mol_type = other DNA
gcgccggtgagaggagacctgattggtacg

SEQ ID NO: 363 - DNA, 30 bp, synthetic construct
  misc_feature 1..30: note = Synthetic
  source 1..30: mol_type = other DNA
tcgaatactagaggagacacgaatagtttg

SEQ ID NO: 364 - DNA, 30 bp, synthetic construct
  misc_feature 1..30: note = Synthetic
  source 1..30: mol_type = other DNA
gagccgaagagaggagacttgagtaatacg

SEQ ID NO: 365 - DNA, 30 bp, synthetic construct
  misc_feature 1..30: note = Synthetic
  source 1..30: mol_type = other DNA
tcggttgggagaggagacacttatcctctg

SEQ ID NO: 366 - DNA, 30 bp, synthetic construct
  misc_feature 1..30: note = Synthetic
  source 1..30: mol_type = other DNA
caaacagccagaggagacatgactggccac

SEQ ID NO: 367 - DNA, 30 bp, synthetic construct
  misc_feature 1..30: note = Synthetic
  source 1..30: mol_type = other DNA
gctggtgcgagaggagacttggagaatcgg

SEQ ID NO: 368 - DNA, 30 bp, synthetic construct
  misc_feature 1..30: note = Synthetic
  source 1..30: mol_type = other DNA
atgagcactagaggagacctaaacaacgtc

SEQ ID NO: 369 - DNA, 30 bp, synthetic construct
  misc_feature 1..30: note = Synthetic
  source 1..30: mol_type = other DNA
gaaaaacaaagaggagacctcaacagcatg

SEQ ID NO: 370 - DNA, 30 bp, synthetic construct
  misc_feature 1..30: note = Synthetic
  source 1..30: mol_type = other DNA
attaagacgagaggagaccttggtcatgag

SEQ ID NO: 371 - DNA, 30 bp, synthetic construct
  misc_feature 1..30: note = Synthetic
  source 1..30: mol_type = other DNA
attgggaggagaggagacatggagttgtct

SEQ ID NO: 372 - DNA, 30 bp, synthetic construct
  misc_feature 1..30: note = Synthetic
  source 1..30: mol_type = other DNA
actacgggtagaggagacttgaaggaggtt

SEQ ID NO: 373 - DNA, 30 bp, synthetic construct
  misc_feature 1..30: note = Synthetic
  source 1..30: mol_type = other DNA
acggataagagaggagaccagaatactgtg

SEQ ID NO: 374 - DNA, 30 bp, synthetic construct
  misc_feature 1..30: note = Synthetic
  source 1..30: mol_type = other DNA
tcgaatgttagaggagaccgggaggcggtt

SEQ ID NO: 375 - DNA, 30 bp, synthetic construct
  misc_feature 1..30: note = Synthetic
  source 1..30: mol_type = other DNA
tcagtcggcagaggagaccaaagtcaaatg

SEQ ID NO: 376 - DNA, 30 bp, synthetic construct
  misc_feature 1..30: note = Synthetic
  source 1..30: mol_type = other DNA
tacgccaacagaggagacctgagtcaccaa

SEQ ID NO: 377 - DNA, 30 bp, synthetic construct
  misc_feature 1..30: note = Synthetic
  source 1..30: mol_type = other DNA
caaatatcgagaggagacctaggtatcaac

SEQ ID NO: 378 - DNA, 30 bp, synthetic construct
  misc_feature 1..30: note = Synthetic
  source 1..30: mol_type = other DNA
tcgatgatgagaggagacgctgggcagttg

SEQ ID NO: 379 - DNA, 30 bp, synthetic construct
  misc_feature 1..30: note = Synthetic
  source 1..30: mol_type = other DNA
gaggcgcggagaggagacagtcaggggctg

SEQ ID NO: 380 - DNA, 30 bp, synthetic construct
  misc_feature 1..30: note = Synthetic
  source 1..30: mol_type = other DNA
atgcccacaagaggagaccaaaccaaattc

SEQ ID NO: 381 - protein, 10 aa, synthetic construct
  REGION 1..10: note = Synthetic
SNSRGDYNSL

SEQ ID NO: 382 - protein, 10 aa, synthetic construct
  REGION 1..10: note = Synthetic
QERRGDYTSM

SEQ ID NO: 383 - protein, 10 aa, synthetic construct
  REGION 1..10: note = Synthetic
ASTRGDHGVL

SEQ ID NO: 384 - protein, 10 aa, synthetic construct
  REGION 1..10: note = Synthetic
ENRRGDFNNT

SEQ ID NO: 385 - protein, 10 aa, synthetic construct
  REGION 1..10: note = Synthetic
AHMRGDLGGT

SEQ ID NO: 386 - protein, 10 aa, synthetic construct
  REGION 1..10: note = Synthetic
NGGRGDTTHF

SEQ ID NO: 387 - protein, 10 aa, synthetic construct
  REGION 1..10: note = Synthetic
SAARGDTERL

SEQ ID NO: 388 - protein, 10 aa, synthetic construct
  REGION 1..10: note = Synthetic
TSVRGDHGTL

SEQ ID NO: 389 - protein, 10 aa, synthetic construct
  REGION 1..10: note = Synthetic
EKLRGDLHST

SEQ ID NO: 390 - protein, 10 aa, synthetic construct
  REGION 1..10: note = Synthetic
ENQRGDLSGR

SEQ ID NO: 391 - protein, 10 aa, synthetic construct
  REGION 1..10: note = Synthetic
AMIRGDMTHS

SEQ ID NO: 392 - protein, 10 aa, synthetic construct
  REGION 1..10: note = Synthetic
EERRGDTHRL

SEQ ID NO: 393 - protein, 10 aa, synthetic construct
  REGION 1..10: note = Synthetic
ENRRGDITQS

SEQ ID NO: 394 - protein, 10 aa, synthetic construct
  REGION 1..10: note = Synthetic
NAQRGDHGQL

SEQ ID NO: 395 - protein, 10 aa, synthetic construct
  REGION 1..10: note = Synthetic
SHLRGDQALA

SEQ ID NO: 396 - protein, 10 aa, synthetic construct
  REGION 1..10: note = Synthetic
SNVRGDREAV

SEQ ID NO: 397 - protein, 10 aa, synthetic construct
  REGION 1..10: note = Synthetic
SSARGDRDYL

SEQ ID NO: 398 - protein, 10 aa, synthetic construct
  REGION 1..10: note = Synthetic
STVRGDYTSV

SEQ ID NO: 399 - protein, 10 aa, synthetic construct
  REGION 1..10: note = Synthetic
SYQRGDQHNM

SEQ ID NO: 400 - protein, 10 aa, synthetic construct
  REGION 1..10: note = Synthetic
NDTRGDRSYM

SEQ ID NO: 401 - protein, 10 aa, synthetic construct
  REGION 1..10: note = Synthetic
SGSRGDLSGH

SEQ ID NO: 402 - protein, 10 aa, synthetic construct
  REGION 1..10: note = Synthetic
DKPRGDRQLL

SEQ ID NO: 403 - protein, 10 aa, synthetic construct
  REGION 1..10: note = Synthetic
SNNRGDYTTM

SEQ ID NO: 404 - protein, 10 aa, synthetic construct
  REGION 1..10: note = Synthetic
QGGRGDLSTL

SEQ ID NO: 405 - protein, 10 aa, synthetic construct
  REGION 1..10: note = Synthetic
SKDRGDYQTL

SEQ ID NO: 406 - protein, 10 aa, synthetic construct
  REGION 1..10: note = Synthetic
ATARGDQMKL

SEQ ID NO: 407 - protein, 10 aa, synthetic construct
  REGION 1..10: note = Synthetic
QHMRGDLTGA

SEQ ID NO: 408 - protein, 10 aa, synthetic construct
  REGION 1..10: note = Synthetic
DGTRGDLGRY

SEQ ID NO: 409 - protein, 10 aa, synthetic construct
  REGION 1..10: note = Synthetic
DSRRGDYANL

SEQ ID NO: 410 - protein, 10 aa, synthetic construct
  REGION 1..10: note = Synthetic
SAMRGDYTST

SEQ ID NO: 411 - protein, 10 aa, synthetic construct
  REGION 1..10: note = Synthetic
ENRRGDAQLL

SEQ ID NO: 412 - protein, 10 aa, synthetic construct
  REGION 1..10: note = Synthetic
TTLRGDHSQL

SEQ ID NO: 413 - protein, 10 aa, synthetic construct
  REGION 1..10: note = Synthetic
DAGRGDMHRM

SEQ ID NO: 414 - protein, 10 aa, synthetic construct
  REGION 1..10: note = Synthetic
QHTRGDLSST

SEQ ID NO: 415 - protein, 10 aa, synthetic construct
  REGION 1..10: note = Synthetic
QVYRGDRESV

SEQ ID NO: 416 - protein, 10 aa, synthetic construct
  REGION 1..10: note = Synthetic
SSQRGDLAGT

SEQ ID NO: 417 - protein, 10 aa, synthetic construct
  REGION 1..10: note = Synthetic
TDVRGDRGTF

SEQ ID NO: 418 - protein, 10 aa, synthetic construct
  REGION 1..10: note = Synthetic
SSVRGDREVT

SEQ ID NO: 419 - protein, 10 aa, synthetic construct
  REGION 1..10: note = Synthetic
ENRRGDLTNA

SEQ ID NO: 420 - protein, 10 aa, synthetic construct
  REGION 1..10: note = Synthetic
SYARGDVHSI

SEQ ID NO: 421 - protein, 10 aa, synthetic construct
  REGION 1..10: note = Synthetic
DSSRGDLNLR

SEQ ID NO: 422 - protein, 10 aa, synthetic construct
  REGION 1..10: note = Synthetic
SNARGDYSNM

SEQ ID NO: 423 - protein, 10 aa, synthetic construct
  REGION 1..10: note = Synthetic
SSVRGDHSVL

SEQ ID NO: 424 - protein, 10 aa, synthetic construct
  REGION 1..10: note = Synthetic
SAFRGDLHAT

SEQ ID NO: 425 - protein, 10 aa, synthetic construct
  REGION 1..10: note = Synthetic
SDRRGDQLLY

SEQ ID NO: 426 - protein, 10 aa, synthetic construct
  REGION 1..10: note = Synthetic
SGVRGDRLAV

SEQ ID NO: 427 - protein, 10 aa, synthetic construct
  REGION 1..10: note = Synthetic
ASLRGDLSST

SEQ ID NO: 428 - protein, 10 aa, synthetic construct
  REGION 1..10: note = Synthetic
TNGRGDLHGM

SEQ ID NO: 429 - protein, 10 aa, synthetic construct
  REGION 1..10: note = Synthetic
TNTRGDHGML

SEQ ID NO: 430 - protein, 10 aa, synthetic construct
  REGION 1..10: note = Synthetic
EDRRGDLLRT

SEQ ID NO: 431 - protein, 10 aa, synthetic construct
  REGION 1..10: note = Synthetic
SSLRGDLLHS

SEQ ID NO: 432 - protein, 10 aa, synthetic construct
  REGION 1..10: note = Synthetic
DGRRGDRESI

SEQ ID NO: 433 - protein, 10 aa, synthetic construct
  REGION 1..10: note = Synthetic
TGTRGDTMTW

SEQ ID NO: 434 - protein, 10 aa, synthetic construct
  REGION 1..10: note = Synthetic
SATRGDHNVL

SEQ ID NO: 435 - protein, 10 aa, synthetic construct
  REGION 1..10: note = Synthetic
TDRRGDSGTL

SEQ ID NO: 436 - protein, 10 aa, synthetic construct
  REGION 1..10: note = Synthetic
TSARGDLIHT

SEQ ID NO: 437 - protein, 10 aa, synthetic construct
  REGION 1..10: note = Synthetic
AVERGDRLML

SEQ ID NO: 438 - protein, 10 aa, synthetic construct
  REGION 1..10: note = Synthetic
DRSRGDTHVL

SEQ ID NO: 439 - protein, 10 aa, synthetic construct
  REGION 1..10: note = Synthetic
ESTRGDLRVV

SEQ ID NO: 440 - protein, 10 aa, synthetic construct
  REGION 1..10: note = Synthetic
TTIRGDYREL

SEQ ID NO: 441 - protein, 10 aa, synthetic construct
  REGION 1..10: note = Synthetic
TFIRGDLAGA

SEQ ID NO: 442 - protein, 10 aa, synthetic construct
  REGION 1..10: note = Synthetic
MTSRGDLTTY

SEQ ID NO: 443 - protein, 10 aa, synthetic construct
  REGION 1..10: note = Synthetic
ADRRGDQLYS

SEQ ID NO: 444 - protein, 10 aa, synthetic construct
  REGION 1..10: note = Synthetic
GYVRGDLGQH

SEQ ID NO: 445 - protein, 10 aa, synthetic construct
  REGION 1..10: note = Synthetic
DASRGDRTSL

SEQ ID NO: 446 - protein, 10 aa, synthetic construct
  REGION 1..10: note = Synthetic
TEVRGDRSQV

SEQ ID NO: 447 - protein, 10 aa, synthetic construct
  REGION 1..10: note = Synthetic
SEVRGDRLSI

SEQ ID NO: 448 - protein, 10 aa, synthetic construct
  REGION 1..10: note = Synthetic
SDRRGDLSGA

SEQ ID NO: 449 - protein, 10 aa, synthetic construct
  REGION 1..10: note = Synthetic
SVTRGDRVVI

SEQ ID NO: 450 - protein, 10 aa, synthetic construct
  REGION 1..10: note = Synthetic
SEGRGDRMAL

SEQ ID NO: 451 - protein, 10 aa, synthetic construct
  REGION 1..10: note = Synthetic
SSTRGDHLSL

SEQ ID NO: 452 - protein, 10 aa, synthetic construct
  REGION 1..10: note = Synthetic
SSTRGDQIYV

SEQ ID NO: 453 - protein, 10 aa, synthetic construct
  REGION 1..10: note = Synthetic
SAQRDRMGSP

SEQ ID NO: 454 - protein, 10 aa, synthetic construct
  REGION 1..10: note = Synthetic
TGTRGDIATF

SEQ ID NO: 455 - protein, 10 aa, synthetic construct
  REGION 1..10: note = Synthetic
SMQRGDLLST

SEQ ID NO: 456 - protein, 10 aa, synthetic construct
  REGION 1..10: note = Synthetic
EDVRGDRSKL

SEQ ID NO: 457 - protein, 10 aa, synthetic construct
  REGION 1..10: note = Synthetic
TSVRGDQSQY

SEQ ID NO: 458 - protein, 10 aa, synthetic construct
  REGION 1..10: note = Synthetic
ADRRGDTGLF

SEQ ID NO: 459 - protein, 10 aa, synthetic construct
  REGION 1..10: note = Synthetic
NTYRGDRDSL

SEQ ID NO: 460 - protein, 10 aa, synthetic construct
  REGION 1..10: note = Synthetic
SRGRGDLNDL

SEQ ID NO: 461 - protein, 10 aa, synthetic construct
  REGION 1..10: note = Synthetic
MDRRGDASIL

SEQ ID NO: 462 - protein, 10 aa, synthetic construct
  REGION 1..10: note = Synthetic
SIWRGDRTEV

SEQ ID NO: 463 - protein, 10 aa, synthetic construct
  REGION 1..10: note = Synthetic
NSQRGDYSGM

SEQ ID NO: 464 - protein, 10 aa, synthetic construct
  REGION 1..10: note = Synthetic
SSVRGDIGGI

SEQ ID NO: 465 - protein, 10 aa, synthetic construct
  REGION 1..10: note = Synthetic
EIRRGDLLAQ

SEQ ID NO: 466 - protein, 10 aa, synthetic construct
  REGION 1..10: note = Synthetic
SNIRGDHAVM

SEQ ID NO: 467 - protein, 10 aa, synthetic construct
  REGION 1..10: note = Synthetic
LDTRGDRSQV

SEQ ID NO: 468 - protein, 10 aa, synthetic construct
  REGION 1..10: note = Synthetic
ANTRGDHQNF

SEQ ID NO: 469 - protein, 10 aa, synthetic construct
  REGION 1..10: note = Synthetic
TSVRGDLSMN

SEQ ID NO: 470 - protein, 10 aa, synthetic construct
  REGION 1..10: note = Synthetic
TTTRGDYLNT

SEQ ID NO: 471 - protein, 10 aa, synthetic construct
  REGION 1..10: note = Synthetic
AERRGDIKEY

SEQ ID NO: 472 - protein, 10 aa, synthetic construct
  REGION 1..10: note = Synthetic
SHARGDLGST

SEQ ID NO: 473 - protein, 10 aa, synthetic construct
  REGION 1..10: note = Synthetic
TSQRGDYVSL

SEQ ID NO: 474 - protein, 10 aa, synthetic construct
  REGION 1..10: note = Synthetic
VNVRGDRGEV

SEQ ID NO: 475 - protein, 10 aa, synthetic construct
  REGION 1..10: note = Synthetic
SYRRGDHDQL

SEQ ID NO: 476 - protein, 10 aa, synthetic construct
  REGION 1..10: note = Synthetic
SGTRGDRVDL

SEQ ID NO: 477 - protein, 10 aa, synthetic construct
  REGION 1..10: note = Synthetic
SHFRGDLHTS

SEQ ID NO: 478 - protein, 10 aa, synthetic construct
  REGION 1..10: note = Synthetic
SDRRGDLSVP

SEQ ID NO: 479 - protein, 10 aa, synthetic construct
  REGION 1..10: note = Synthetic
SGTRGDTLIL

SEQ ID NO: 480 - protein, 10 aa, synthetic construct
  REGION 1..10: note = Synthetic
ENTRGDLHGK

SEQ ID NO: 481 - protein, 10 aa, synthetic construct
  REGION 1..10: note = Synthetic
DRARGDTHVL

SEQ ID NO: 482 - protein, 10 aa, synthetic construct
  REGION 1..10: note = Synthetic
ASGRGDIAGL

SEQ ID NO: 483 - protein, 10 aa, synthetic construct
  REGION 1..10: note = Synthetic
EGRRGDLFQA

SEQ ID NO: 484 - protein, 10 aa, synthetic construct
  REGION 1..10: note = Synthetic
RSERGDRLEI

SEQ ID NO: 485 - protein, 10 aa, synthetic construct
  REGION 1..10: note = Synthetic
AAYRGDAHVL

SEQ ID NO: 486 - protein, 10 aa, synthetic construct
  REGION 1..10: note = Synthetic
NDSRGDQHRL

SEQ ID NO: 487 - protein, 10 aa, synthetic construct
  REGION 1..10: note = Synthetic
SSARGDHSQL

SEQ ID NO: 488 - protein, 10 aa, synthetic construct
  REGION 1..10: note = Synthetic
TNERGDRLSI

SEQ ID NO: 489 - protein, 10 aa, synthetic construct
  REGION 1..10: note = Synthetic
SNSRGDYTSV

SEQ ID NO: 490 - protein, 10 aa, synthetic construct
  REGION 1..10: note = Synthetic
NVTRGDHTVM

SEQ ID NO: 491 - protein, 10 aa, synthetic construct
  REGION 1..10: note = Synthetic
TMVRGDVKGL

SEQ ID NO: 492 - protein, 10 aa, synthetic construct
  REGION 1..10: note = Synthetic
VQLRGDLAST

SEQ ID NO: 493 - protein, 10 aa, synthetic construct
  REGION 1..10: note = Synthetic
MNRRGDYSEQ

SEQ ID NO: 494 - protein, 10 aa, synthetic construct
  REGION 1..10: note = Synthetic
ANTRGDLSPV

SEQ ID NO: 495 - protein, 10 aa, synthetic construct
  REGION 1..10: note = Synthetic
TGMRGDAGSL

SEQ ID NO: 496 - protein, 10 aa, synthetic construct
  REGION 1..10: note = Synthetic
LDRRGDFSSA

SEQ ID NO: 497 - protein, 10 aa, synthetic construct
  REGION 1..10: note = Synthetic
MYHRGDMTSV

SEQ ID NO: 498 - protein, 10 aa, synthetic construct
  REGION 1..10: note = Synthetic
GSMRGDLHST

SEQ ID NO: 499 - protein, 10 aa, synthetic construct
  REGION 1..10: note = Synthetic
SSSRGDFSSV

SEQ ID NO: 500 - protein, 10 aa, synthetic construct
  REGION 1..10: note = Synthetic
TGTRGDLHTY

SEQ ID NO: 501 - protein, 10 aa, synthetic construct
  REGION 1..10: note = Synthetic
YTQRGDLATV

SEQ ID NO: 502 - protein, 10 aa, synthetic construct
  REGION 1..10: note = Synthetic
TDVRGDRMYV

SEQ ID NO: 503 - protein, 10 aa, synthetic construct
  REGION 1..10: note = Synthetic
SNSRGDLSVN

SEQ ID NO: 504 - protein, 10 aa, synthetic construct
  REGION 1..10: note = Synthetic
QSGRGDQMTL

SEQ ID NO: 505 - protein, 10 aa, synthetic construct
  REGION 1..10: note = Synthetic
MNTRGDLQQS

SEQ ID NO: 506 - protein, 10 aa, synthetic construct
  REGION 1..10: note = Synthetic
AGSRGDLQTV

SEQ ID NO: 507 - protein, 10 aa, synthetic construct
  REGION 1..10: note = Synthetic
SNMRGDQTYV

SEQ ID NO: 508 - protein, 10 aa, synthetic construct
  REGION 1..10: note = Synthetic
TPSRGDMSNV

SEQ ID NO: 509 - protein, 10 aa, synthetic construct
  REGION 1..10: note = Synthetic
NSTRGDLHMA

SEQ ID NO: 510 - protein, 10 aa, synthetic construct
  REGION 1..10: note = Synthetic
ANTRGDLSVS

SEQ ID NO: 511 - protein, 10 aa, synthetic construct
  REGION 1..10: note = Synthetic
TDRRGDTGLL

SEQ ID NO: 512 - protein, 10 aa, synthetic construct
  REGION 1..10: note = Synthetic
DGVRGDRATW

SEQ ID NO: 513 - protein, 10 aa, synthetic construct
  REGION 1..10: note = Synthetic
EPSRGDRMVL

SEQ ID NO: 514 - protein, 10 aa, synthetic construct
  REGION 1..10: note = Synthetic
SGVRGDRIII

SEQ ID NO: 515 - protein, 10 aa, synthetic construct
  REGION 1..10: note = Synthetic
TSMRGDYTHV

SEQ ID NO: 516 - protein, 10 aa, synthetic construct
  REGION 1..10: note = Synthetic
ASSRGDLTVI

SEQ ID NO: 517 - protein, 10 aa, synthetic construct
  REGION 1..10: note = Synthetic
ETRRGDLSLQ

SEQ ID NO: 518 - protein, 10 aa, synthetic construct
  REGION 1..10: note = Synthetic
NNARGDQSMH

SEQ ID NO: 519 - protein, 10 aa, synthetic construct
  REGION 1..10: note = Synthetic
TDRRGDSSAL

SEQ ID NO: 520 - protein, 10 aa, synthetic construct
  REGION 1..10: note = Synthetic
SSQRGDLTGV

SEQ ID NO: 521 - protein, 10 aa, synthetic construct
  REGION 1..10: note = Synthetic
QTARGDVMVH

SEQ ID NO: 522 - protein, 10 aa, synthetic construct
  REGION 1..10: note = Synthetic
VSQRGDLNAV

SEQ ID NO: 523 - protein, 10 aa, synthetic construct
  REGION 1..10: note = Synthetic
TMTRGDLAAN

SEQ ID NO: 524 - protein, 10 aa, synthetic construct
  REGION 1..10: note = Synthetic
NASRGDHSSL

SEQ ID NO: 525 - protein, 10 aa, synthetic construct
  REGION 1..10: note = Synthetic
SNTRGDMGLT

SEQ ID NO: 526 - protein, 10 aa, synthetic construct
  REGION 1..10: note = Synthetic
MYSRGDTHSL

SEQ ID NO: 527 - protein, 10 aa, synthetic construct
  REGION 1..10: note = Synthetic
ADQRGDRAPL

SEQ ID NO: 528 - protein, 10 aa, synthetic construct
  REGION 1..10: note = Synthetic
SQNRGDLANT

SEQ ID NO: 529 - protein, 10 aa, synthetic construct
  REGION 1..10: note = Synthetic
SNRRGDTEMQ

SEQ ID NO: 530 - protein, 10 aa, synthetic construct
  REGION 1..10: note = Synthetic
SGSRGDVSAL

SEQ ID NO: 531 - protein, 10 aa, synthetic construct
  REGION 1..10: note = Synthetic
ESTRGDRGTL

SEQ ID NO: 532 - protein, 10 aa, synthetic construct
  REGION 1..10: note = Synthetic
SAVRGDAALH

SEQ ID NO: 533 - protein, 10 aa, synthetic construct
  REGION 1..10: note = Synthetic
LSSRGDVNRL

SEQ ID NO: 534 - protein, 10 aa, synthetic construct
  REGION 1..10: note = Synthetic
EQRRGDIQTI

SEQ ID NO: 535 - protein, 10 aa, synthetic construct
  REGION 1..10: note = Synthetic
SPVRGDHGAL

SEQ ID NO: 536 - protein, 10 aa, synthetic construct
  REGION 1..10: note = Synthetic
LSRRGDYQEL

SEQ ID NO: 537 - protein, 10 aa, synthetic construct
  REGION 1..10: note = Synthetic
DSRRGDASYH

SEQ ID NO: 538 - protein, 10 aa, synthetic construct
  REGION 1..10: note = Synthetic
NHQRGDLSSS

SEQ ID NO: 539 - protein, 10 aa, synthetic construct
  REGION 1..10: note = Synthetic
SWNRGDISGL

SEQ ID NO: 540 - protein, 10 aa, synthetic construct
  REGION 1..10: note = Synthetic
TGTRGDLGTM

SEQ ID NO: 541 - protein, 10 aa, synthetic construct
  REGION 1..10: note = Synthetic
QQLRGDTHTL

SEQ ID NO: 542 - protein, 10 aa, synthetic construct
  REGION 1..10: note = Synthetic
AGLRGDRDSL

SEQ ID NO: 543 - protein, 10 aa, synthetic construct
  REGION 1..10: note = Synthetic
QVYRGDRDQL

SEQ ID NO: 544 - protein, 10 aa, synthetic construct
  REGION 1..10: note = Synthetic
AGVRGDRVTI

SEQ ID NO: 545 - protein, 10 aa, synthetic construct
  REGION 1..10: note = Synthetic
NSARGDLLHS

SEQ ID NO: 546 - protein, 10 aa, synthetic construct
  REGION 1..10: note = Synthetic
NHSRGDLTGV

SEQ ID NO: 547 - protein, 10 aa, synthetic construct
  REGION 1..10: note = Synthetic
NAYRGDTSAF

SEQ ID NO: 548 - protein, 10 aa, synthetic construct
  REGION 1..10: note = Synthetic
SANRGDIMHT

SEQ ID NO: 549 - protein, 10 aa, synthetic construct
  REGION 1..10: note = Synthetic
QSARGDLVSY

SEQ ID NO: 550 - protein, 10 aa, synthetic construct
  REGION 1..10: note = Synthetic
SFVRGDVRTL

SEQ ID NO: 551 - protein, 10 aa, synthetic construct
  REGION 1..10: note = Synthetic
SDMRGDRSVY

SEQ ID NO: 552 - protein, 10 aa, synthetic construct
  REGION 1..10: note = Synthetic
SGIRGDRYPI

SEQ ID NO: 553 - protein, 10 aa, synthetic construct
  REGION 1..10: note = Synthetic
SNVRGDMAHS

SEQ ID NO: 554 - protein, 10 aa, synthetic construct
  REGION 1..10: note = Synthetic
ASSRGDLQQT

SEQ ID NO: 555 - protein, 10 aa, synthetic construct
  REGION 1..10: note = Synthetic
NSVRGDLNQT

SEQ ID NO: 556 - protein, 10 aa, synthetic construct
  REGION 1..10: note = Synthetic
GPGRGDQTTL

SEQ ID NO: 557 - DNA, 30 bp, synthetic construct
  misc_feature 1..30: note = Synthetic
  source 1..30: mol_type = other DNA
tcaaactccagaggagactacaactccttg

SEQ ID NO: 558 - DNA, 30 bp, synthetic construct
  misc_feature 1..30: note = Synthetic
  source 1..30: mol_type = other DNA
tcgtcggctagaggagaccgtgattatctg

SEQ ID NO: 559 - DNA, 30 bp, synthetic construct
  misc_feature 1..30: note = Synthetic
  source 1..30: mol_type = other DNA
agcacggtcagaggagactacacgtccgtg

SEQ ID NO: 560 - DNA, 30 bp, synthetic construct
  misc_feature 1..30: note = Synthetic
  source 1..30: mol_type = other DNA
caggagcggagaggagactatacgagtatg

SEQ ID NO: 561 - DNA, 30 bp, synthetic construct; identical to SEQ ID NO: 204
  misc_feature 1..30: note = Synthetic
  source 1..30: mol_type = other DNA

SEQ ID NO: 562 - DNA, 30 bp, synthetic construct
  misc_feature 1..30: note = Synthetic
  source 1..30: mol_type = other DNA
gcgagtactagaggagaccatggtgtgttg

SEQ ID NO: 563 - DNA, 30 bp, synthetic construct
  misc_feature 1..30: note = Synthetic
  source 1..30: mol_type = other DNA
tcgtaccaaagaggagaccaacacaacatg

SEQ ID NO: 564 - DNA, 30 bp, synthetic construct
  misc_feature 1..30: note = Synthetic
  source 1..30: mol_type = other DNA
aacgacacaagaggagaccgatcttacatg

SEQ ID NO: 565 - DNA, 30 bp, synthetic construct
  misc_feature 1..30: note = Synthetic
  source 1..30: mol_type = other DNA
gaaaacaggagaggagacttcaacaacact

SEQ ID NO: 566 - DNA, 30 bp, synthetic construct
  misc_feature 1..30: note = Synthetic
  source 1..30: mol_type = other DNA
tccggctcgagaggagacttgtcaggacac

SEQ ID NO: 567 - DNA, 30 bp, synthetic construct; identical to SEQ ID NO: 298
  misc_feature 1..30: note = Synthetic
  source 1..30: mol_type = other DNA

SEQ ID NO: 568 - DNA, 30 bp, synthetic construct
  misc_feature 1..30: note = Synthetic
  source 1..30: mol_type = other DNA
gataagccgagaggagaccggcagttgttg

SEQ ID NO: 569 - DNA, 30 bp, synthetic construct; identical to SEQ ID NO: 279
  misc_feature 1..30: note = Synthetic
  source 1..30: mol_type = other DNA

SEQ ID NO: 570 - DNA, 30 bp, synthetic construct; identical to SEQ ID NO: 275
  misc_feature 1..30: note = Synthetic
  source 1..30: mol_type = other DNA

SEQ ID NO: 571 - DNA, 30 bp, synthetic construct
  misc_feature 1..30: note = Synthetic
  source 1..30: mol_type = other DNA
tcaaacaacagaggagactacacgacaatg

SEQ ID NO: 572 - DNA, 30 bp, synthetic construct
  misc_feature 1..30: note = Synthetic
  source 1..30: mol_type = other DNA
cagggtgggagaggagacttgtcgacgttg

SEQ ID NO: 573 - DNA, 30 bp, synthetic construct
  misc_feature 1..30: note = Synthetic
  source 1..30: mol_type = other DNA
tcgaaggatagaggagactatcagactctt

SEQ ID NO: 574 - DNA, 30 bp, synthetic construct
  misc_feature 1..30: note = Synthetic
  source 1..30: mol_type = other DNA
gctacggcgagaggagaccagatgaagctg

SEQ ID NO: 575 - DNA, 30 bp, synthetic construct
  misc_feature 1..30: note = Synthetic
  source 1..30: mol_type = other DNA
cagcatatgagaggagacttgactggtgcg

SEQ ID NO: 576 - DNA, 30 bp, synthetic construct
  misc_feature 1..30: note = Synthetic
  source 1..30: mol_type = other DNA
gacggcacgagaggagaccttggaaggtac

SEQ ID NO: 577 - DNA, 30 bp, synthetic construct
  misc_feature 1..30: note = Synthetic
  source 1..30: mol_type = other DNA
gactctcggagaggagactacgcaaacctc

SEQ ID NO: 578 - DNA, 30 bp, synthetic construct
  misc_feature 1..30: note = Synthetic
  source 1..30: mol_type = other DNA
tcggcgatgagaggagactatactagtact

SEQ ID NO: 579 - DNA, 30 bp, synthetic construct
  misc_feature 1..30: note = Synthetic
  source 1..30: mol_type = other DNA
gagaatcggagaggagacgcgcagctgctg

SEQ ID NO: 580 - DNA, 30 bp, synthetic construct
  misc_feature 1..30: note = Synthetic
  source 1..30: mol_type = other DNA
acgacgctgagaggagaccatagtcagctt

SEQ ID NO: 581 - DNA, 30 bp, synthetic construct
  misc_feature 1..30: note = Synthetic
  source 1..30: mol_type = other DNA
gacgcagggagaggagacatgcaccgtatg

SEQ ID NO: 582 - DNA, 30 bp, synthetic construct
  misc_feature 1..30: note = Synthetic
  source 1..30: mol_type = other DNA
cagcatacgagaggagacttgagttctact

SEQ ID NO: 583 - DNA, 30 bp, synthetic construct
  misc_feature 1..30: note = Synthetic
  source 1..30: mol_type = other DNA
caagtttacagaggagacagggaatccgtg

SEQ ID NO: 584 - DNA, 30 bp, synthetic construct
  misc_feature 1..30: note = Synthetic
  source 1..30: mol_type = other DNA
tcgagtcagagaggagacttggctggtact

SEQ ID NO: 585 - DNA, 30 bp, synthetic construct
  misc_feature 1..30: note = Synthetic
  source 1..30: mol_type = other DNA
acggatgttagaggagacagggggacgttt

SEQ ID NO: 586 - DNA, 30 bp, synthetic construct
  misc_feature 1..30: note = Synthetic
  source 1..30: mol_type = other DNA
tcgtctgtgagaggagaccgggaggtgacg

SEQ ID NO: 587 - DNA, 30 bp, synthetic construct
  misc_feature 1..30: note = Synthetic
  source 1..30: mol_type = other DNA
gagaataggagaggagacctgactaatgcg

SEQ ID NO: 588 - DNA, 30 bp, synthetic construct
  misc_feature 1..30: note = Synthetic
  source 1..30: mol_type = other DNA
tcgtatgcgagaggagacgttcattctatt

SEQ ID NO: 589 - DNA, 30 bp, synthetic construct
  misc_feature 1..30: note = Synthetic
  source 1..30: mol_type = other DNA
gacagctcaagaggagacctcaacctccgg

SEQ ID NO: 590 - DNA, 30 bp, synthetic construct
  misc_feature 1..30: note = Synthetic
  source 1..30: mol_type = other DNA
tcgaacgcgagaggagactactcaaacatg

SEQ ID NO: 591 - DNA, 30 bp, synthetic construct
  misc_feature 1..30: note = Synthetic
  source 1..30: mol_type = other DNA
tcgtctgtgagaggagaccattcggtgctt

SEQ ID NO: 592 - DNA, 30 bp, synthetic construct
  misc_feature 1..30: note = Synthetic
  source 1..30: mol_type = other DNA
tcggcttttagaggagacctgcatgctact

SEQ ID NO: 593 - DNA, 30 bp, synthetic construct
  misc_feature 1..30: note = Synthetic
  source 1..30: mol_type = other DNA
tccgccatgagaggagactacacaagcacg

SEQ ID NO: 594 - DNA, 30 bp, synthetic construct; identical to SEQ ID NO: 328
  misc_feature 1..30: note = Synthetic
  source 1..30: mol_type = other DNA

SEQ ID NO: 595 - DNA, 30 bp, synthetic construct
  misc_feature 1..30: note = Synthetic
  source 1..30: mol_type = other DNA
tcggatcggagaggagaccagctgttgtat

SEQ ID NO: 596 - DNA, 30 bp, synthetic construct
  misc_feature 1..30: note = Synthetic
  source 1..30: mol_type = other DNA
agcggcgtaagaggagaccgcctagccgta

SEQ ID NO: 597 - DNA, 30 bp, synthetic construct
  misc_feature 1..30: note = Synthetic
  source 1..30: mol_type = other DNA
gccagcctaagaggagacctcagctcaacg

SEQ ID NO: 598 - DNA, 30 bp, synthetic construct
  misc_feature 1..30: note = Synthetic
  source 1..30: mol_type = other DNA
acgaacggaagaggagaccttcacggaatg

SEQ ID NO: 599 - DNA, 30 bp, synthetic construct
  misc_feature 1..30: note = Synthetic
  source 1..30: mol_type = other DNA
acgaatacgagaggagaccatgggatgctg

SEQ ID NO: 600 - DNA, 30 bp, synthetic construct
  misc_feature 1..30: note = Synthetic
  source 1..30: mol_type = other DNA
agttccgccagaggagaccgggactacctc

SEQ ID NO: 601 - DNA, 30 bp, synthetic construct
  misc_feature 1..30: note = Synthetic
  source 1..30: mol_type = other DNA
gaggatcggagaggagaccttttgaggact

SEQ ID NO: 602 - DNA, 30 bp, synthetic construct
  misc_feature 1..30: note = Synthetic
  source 1..30: mol_type = other DNA
tcgtcgctgagaggagacctgttgcattct

SEQ ID NO: 603 - DNA, 30 bp, synthetic construct
  misc_feature 1..30: note = Synthetic
  source 1..30: mol_type = other DNA
gaaaaccgtagaggagacctcacgaacgct

SEQ ID NO: 604 - DNA, 30 bp, synthetic construct
  misc_feature 1..30: note = Synthetic
  source 1..30: mol_type = other DNA
gacggcaggagaggagaccgggaatcgatc

SEQ ID NO: 605 - DNA, 30 bp, synthetic construct
  misc_feature 1..30: note = Synthetic
  source 1..30: mol_type = other DNA
actggaaccagaggagacacaatgacatgg

SEQ ID NO: 606 - DNA, 30 bp, synthetic construct
  misc_feature 1..30: note = Synthetic
  source 1..30: mol_type = other DNA
tcgactgttagaggagactatacttctgtt

SEQ ID NO: 607 - DNA, 30 bp, synthetic construct
  misc_feature 1..30: note = Synthetic
  source 1..30: mol_type = other DNA
tcggcaacgagaggagaccacaacgtactg

SEQ ID NO: 608 - DNA, 30 bp, synthetic construct
  misc_feature 1..30: note = Synthetic
  source 1..30: mol_type = other DNA
acggatcggagaggagacagtggtactctg

SEQ ID NO: 609 - DNA, 30 bp, synthetic construct
  misc_feature 1..30: note = Synthetic
  source 1..30: mol_type = other DNA
acgagtgctagaggagacctgattcatacg

SEQ ID NO: 610 - DNA, 30 bp, synthetic construct
  misc_feature 1..30: note = Synthetic
  source 1..30: mol_type = other DNA
agtggggtgagaggagaccggctggcggtg

SEQ ID NO: 611 - DNA, 30 bp, synthetic construct
  misc_feature 1..30: note = Synthetic
  source 1..30: mol_type = other DNA
gcggttgagagaggagaccgtcttatgctg

SEQ ID NO: 612 - DNA, 30 bp, synthetic construct
  misc_feature 1..30: note = Synthetic
  source 1..30: mol_type = other DNA
gacaggtcgagaggagacacgcacgtactc

SEQ ID NO: 613 - DNA, 30 bp, synthetic construct
  misc_feature 1..30: note = Synthetic
  source 1..30: mol_type = other DNA
gagtcgacgagaggagaccttcgtgttgtg

SEQ ID NO: 614 - DNA, 30 bp, synthetic construct
  misc_feature 1..30: note = Synthetic
  source 1..30: mol_type = other DNA
acgacgattagaggagactatcgtgagttg

SEQ ID NO: 615 - DNA, 30 bp, synthetic construct
  misc_feature 1..30: note = Synthetic
  source 1..30: mol_type = other DNA
acgttcatcagaggagacctggcaggtgcg

SEQ ID NO: 616 - DNA, 30 bp, synthetic construct
  misc_feature 1..30: note = Synthetic
  source 1..30: mol_type = other DNA
atgacgagcagaggagacttgacaacatac

SEQ ID NO: 617 - DNA, 30 bp, synthetic construct
  misc_feature 1..30: note = Synthetic
  source 1..30: mol_type = other DNA
gcggatcgtagaggagaccagctttattcg

SEQ ID NO: 618 - DNA, 30 bp, synthetic construct; identical to SEQ ID NO: 192
  misc_feature 1..30: note = Synthetic
  source 1..30: mol_type = other DNA

SEQ ID NO: 619 - DNA, 30 bp, synthetic construct
  misc_feature 1..30: note = Synthetic
  source 1..30: mol_type = other DNA
gggtacgtcagaggagacctggggcaacac

SEQ ID NO: 620 - DNA, 30 bp, synthetic construct
  misc_feature 1..30: note = Synthetic
  source 1..30: mol_type = other DNA
gatgcgagtagaggagacaggactagtttg

SEQ ID NO: 621 - DNA, 30 bp, synthetic construct
  misc_feature 1..30: note = Synthetic
  source 1..30: mol_type = other DNA
acggaggtgagaggagacaggtcgcaggtt

SEQ ID NO: 622 - DNA, 30 bp, synthetic construct
  misc_feature 1..30: note = Synthetic
  source 1..30: mol_type = other DNA
tcgcatctgagaggagaccaggctcttgcg

SEQ ID NO: 623 - DNA, 30 bp, synthetic construct
  misc_feature 1..30: note = Synthetic
  source 1..30: mol_type = other DNA
tcggaggtgagaggagaccggttgagtatt

SEQ ID NO: 624 - DNA, 30 bp, synthetic construct; identical to SEQ ID NO: 215
  misc_feature 1..30: note = Synthetic
  source 1..30: mol_type = other DNA

SEQ ID NO: 625 - DNA, 30 bp, synthetic construct
  misc_feature 1..30: note = Synthetic
  source 1..30: mol_type = other DNA
tcagaccgtagaggagacctgtcgggcgct

SEQ ID NO: 626 - DNA, 30 bp, synthetic construct
  misc_feature 1..30: note = Synthetic
  source 1..30: mol_type = other DNA
agcgtcacaagaggagacagagtagtcatc

SEQ ID NO: 627 - DNA, 30 bp, synthetic construct
  misc_feature 1..30: note = Synthetic
  source 1..30: mol_type = other DNA
tcggaggggagaggagacaggatggctctt

SEQ ID NO: 628 - DNA, 30 bp, synthetic construct
  misc_feature 1..30: note = Synthetic
  source 1..30: mol_type = other DNA
tcgtctactagaggagaccatctttcgctg

SEQ ID NO: 629 - DNA, 30 bp, synthetic construct
  misc_feature 1..30: note = Synthetic
  source 1..30: mol_type = other DNA
gctatgatcagaggagacatgacccactcc

SEQ ID NO: 630 - DNA, 30 bp, synthetic construct
  misc_feature 1..30: note = Synthetic
  source 1..30: mol_type = other DNA
tcgtcgacgagaggagaccagatttatgtg

SEQ ID NO: 631 - DNA, 30 bp, synthetic construct
  misc_feature 1..30: note = Synthetic
  source 1..30: mol_type = other DNA
gaggagcggagaggagacactcatcggttg

SEQ ID NO: 632 - DNA, 30 bp, synthetic construct
  misc_feature 1..30: note = Synthetic
  source 1..30: mol_type = other DNA
tcgaattcgagaggagactataatagtctt

SEQ ID NO: 633 - DNA, 30 bp, synthetic construct
  misc_feature 1..30: note = Synthetic
  source 1..30: mol_type = other DNA
tccgcacaaagggatcgtatgggttctccg

SEQ ID NO: 634 - DNA, 30 bp, synthetic construct
  misc_feature 1..30: note = Synthetic
  source 1..30: mol_type = other DNA
acgggtacgagaggagacattgcgactttt

SEQ ID NO: 635 - DNA, 30 bp, synthetic construct
  misc_feature 1..30: note = Synthetic
  source 1..30: mol_type = other DNA
tcgatgcagagaggagacctgctttctact

SEQ ID NO: 636 - DNA, 30 bp, synthetic construct
  misc_feature 1..30: note = Synthetic
  source 1..30: mol_type = other DNA
gaggatgtgagaggagacaggagtaagctt

SEQ ID NO: 637 - DNA, 30 bp, synthetic construct; identical to SEQ ID NO: 199
  misc_feature 1..30: note = Synthetic
  source 1..30: mol_type = other DNA

SEQ ID NO: 638 - DNA, 30 bp, synthetic construct
  misc_feature 1..30: note = Synthetic
  source 1..30: mol_type = other DNA
acgagtgtgagaggagaccagagtcagtat

SEQ ID NO: 639 - DNA, 30 bp, synthetic construct
  misc_feature 1..30: note = Synthetic
  source 1..30: mol_type = other DNA
gcggatcggagaggagacacggggttgttt

SEQ ID NO: 640 - DNA, 30 bp, synthetic construct
  misc_feature 1..30: note = Synthetic
  source 1..30: mol_type = other DNA
aacacttacagaggagaccgagacagcctg

SEQ ID NO: 641 - DNA, 30 bp, synthetic construct
  misc_feature 1..30: note = Synthetic
  source 1..30: mol_type = other DNA
acggatgttagaggagaccgggggacgttt

SEQ ID NO: 642 - DNA, 30 bp, synthetic construct
  misc_feature 1..30: note = Synthetic
  source 1..30: mol_type = other DNA
tctcgtgggagaggagacctgaatgatttg

SEQ ID NO: 643 - DNA, 30 bp, synthetic construct
  misc_feature 1..30: note = Synthetic
  source 1..30: mol_type = other DNA
agcaacgtaagaggagacagggaagccgtc

SEQ ID NO: 644 - DNA, 30 bp, synthetic construct
  misc_feature 1..30: note = Synthetic
  source 1..30: mol_type = other DNA
atggacaggagaggagacgcctccatactg

SEQ ID NO: 645 - DNA, 30 bp, synthetic construct
  misc_feature 1..30: note = Synthetic
  source 1..30: mol_type = other DNA
tcgatatggagaggagaccgtacagaagtc

SEQ ID NO: 646 - DNA, 30 bp, synthetic construct
  misc_feature 1..30: note = Synthetic
  source 1..30: mol_type = other DNA
aactcacaaagaggagactacagtggaatg

SEQ ID NO: 647 - DNA, 30 bp, synthetic construct
  misc_feature 1..30: note = Synthetic
  source 1..30: mol_type = other DNA
tctagcgtaagaggagacatcggggggatc

SEQ ID NO: 648 - DNA, 30 bp, synthetic construct; identical to SEQ ID NO: 248
  misc_feature 1..30: note = Synthetic
  source 1..30: mol_type = other DNA

SEQ ID NO: 649 - DNA, 30 bp, synthetic construct
  misc_feature 1..30: note = Synthetic
  source 1..30: mol_type = other DNA
gagattcggagaggagaccttctggctcag

SEQ ID NO: 650 - DNA, 30 bp, synthetic construct
  misc_feature 1..30: note = Synthetic
  source 1..30: mol_type = other DNA
tcgaacatcagaggagaccacgcagtcatg

SEQ ID NO: 651 - DNA, 30 bp, synthetic construct
  misc_feature 1..30: note = Synthetic
  source 1..30: mol_type = other DNA
ctggatacgagaggagaccggagtcaggtt

SEQ ID NO: 652 - DNA, 30 bp, synthetic construct
  misc_feature 1..30: note = Synthetic
  source 1..30: mol_type = other DNA
gcgaatacgagaggagaccatcagaatttt

SEQ ID NO: 653 - DNA, 30 bp, synthetic construct
  misc_feature 1..30: note = Synthetic
  source 1..30: mol_type = other DNA
caggtgtatagaggagaccgtgagtctgtt

SEQ ID NO: 654 - DNA, 30 bp, synthetic construct
  misc_feature 1..30: note = Synthetic
  source 1..30: mol_type = other DNA
acgtcggtgagaggagacctttcgatgaat

SEQ ID NO: 655 - DNA, 30 bp, synthetic construct
  misc_feature 1..30: note = Synthetic
  source 1..30: mol_type = other DNA
gcctcaacgagaggagaccacggagttctc

SEQ ID NO: 656 - DNA, 30 bp, synthetic construct
  misc_feature 1..30: note = Synthetic
  source 1..30: mol_type = other DNA
acgacgacgagaggagactatcttaatacg

SEQ ID NO: 657 - DNA, 30 bp, synthetic construct
  misc_feature 1..30: note = Synthetic
  source 1..30: mol_type = other DNA
gcggagaggagaggagacattaaggagtat

SEQ ID NO: 658 - DNA, 30 bp, synthetic construct
  misc_feature 1..30: note = Synthetic
  source 1..30: mol_type = other DNA
tcgcatgctagaggagacttgggttcgact

SEQ ID NO: 659 - DNA, 30 bp, synthetic construct
  misc_feature 1..30: note = Synthetic
  source 1..30: mol_type = other DNA
acgtctcagagaggagactatgtttctctt

SEQ ID NO: 660 - DNA, 30 bp, synthetic construct; identical to SEQ ID NO: 182
  misc_feature 1..30: note = Synthetic
  source 1..30: mol_type = other DNA

SEQ ID NO: 661 - DNA, 30 bp, synthetic construct
  misc_feature 1..30: note = Synthetic
  source 1..30: mol_type = other DNA
gtgaatgtgagaggagaccgtggtgaggtg

SEQ ID NO: 662 - DNA, 30 bp, synthetic construct
  misc_feature 1..30: note = Synthetic
  source 1..30: mol_type = other DNA
tcgtatcgtagaggagaccatgatcagctt

SEQ ID NO: 663 - DNA, 30 bp, synthetic construct
  misc_feature 1..30: note = Synthetic
  source 1..30: mol_type = other DNA
agcggcacaagaggagacagggtagacctc

SEQ ID NO: 664 - DNA, 30 bp, synthetic construct
  misc_feature 1..30: note = Synthetic
  source 1..30: mol_type = other DNA
tcccacttcagaggagacttgcacacgtcc

SEQ ID NO: 665 - DNA, 30 bp, synthetic construct
  misc_feature 1..30: note = Synthetic
  source 1..30: mol_type = other DNA
tcggatcgtagaggagacctttcggtgcct

SEQ ID NO: 666 - DNA, 30 bp, synthetic construct
  misc_feature 1..30: note = Synthetic
  source 1..30: mol_type = other DNA
agcggcaccagaggagacacccttatactc

SEQ ID NO: 667 - DNA, 30 bp, synthetic construct
  misc_feature 1..30: note = Synthetic
  source 1..30: mol_type = other DNA
gaaaacaccagaggagacctccacggcaaa

SEQ ID NO: 668 - DNA, 30 bp, synthetic construct
  misc_feature 1..30: note = Synthetic
  source 1..30: mol_type = other DNA
gatcgggcgagaggagacacgcatgtgctg

SEQ ID NO: 669 - DNA, 30 bp, synthetic construct
  misc_feature 1..30: note = Synthetic
  source 1..30: mol_type = other DNA
gcgtctggtagaggagacattgcggggctt

SEQ ID NO: 670 - DNA, 30 bp, synthetic construct
  misc_feature 1..30: note = Synthetic
  source 1..30: mol_type = other DNA
gagggtcgtagaggagacctgtttcaggcg

SEQ ID NO: 671 - DNA, 30 bp, synthetic construct
  misc_feature 1..30: note = Synthetic
  source 1..30: mol_type = other DNA
agatccgaaagaggagacaggctagaaatc

SEQ ID NO: 672 - DNA, 30 bp, synthetic construct
  misc_feature 1..30: note = Synthetic
  source 1..30: mol_type = other DNA
gcggcctacagaggagacgcacacgtgctc

SEQ ID NO: 673 - DNA, 30 bp, synthetic construct
  misc_feature 1..30: note = Synthetic
  source 1..30: mol_type = other DNA
aacgactcgagaggagaccaacaccgattg

SEQ ID NO: 674 - DNA, 30 bp, synthetic construct
  misc_feature 1..30: note = Synthetic
  source 1..30: mol_type = other DNA
tcatcggcaagaggagaccactctcaactg

SEQ ID NO: 675 - DNA, 30 bp, synthetic construct
  misc_feature 1..30: note = Synthetic
  source 1..30: mol_type = other DNA
acgaatgagagaggagaccgtctttcgatt

SEQ ID NO: 676 - DNA, 30 bp, synthetic construct
  misc_feature 1..30: note = Synthetic
  source 1..30: mol_type = other DNA
agcaactccagaggagactacaccagtgtc

SEQ ID NO: 677 - DNA, 30 bp, synthetic construct
  misc_feature 1..30: note = Synthetic
  source 1..30: mol_type = other DNA
aacgtcacaagaggagaccacaccgttatg

SEQ ID NO: 678 - DNA, 30 bp, synthetic construct
  misc_feature 1..30: note = Synthetic
  source 1..30: mol_type = other DNA
acgatggtgagaggagacgttaaggggctt

SEQ ID NO: 679 - DNA, 30 bp, synthetic construct
  misc_feature 1..30: note = Synthetic
  source 1..30: mol_type = other DNA
accgggacaagaggagacatagccacgttc

SEQ ID NO: 680 - DNA, 30 bp, synthetic construct
  misc_feature 1..30: note = Synthetic
  source 1..30: mol_type = other DNA
gtgcagctgagaggagacttggcttctact

SEQ ID NO: 681 - DNA, 30 bp, synthetic construct
  misc_feature 1..30: note = Synthetic
  source 1..30: mol_type = other DNA
atgaaccggagaggagactactcggaacaa

SEQ ID NO: 682 - DNA, 30 bp, synthetic construct
  misc_feature 1..30: note = Synthetic
  source 1..30: mol_type = other DNA
gcgaatactagaggagacctgagtccggtt

SEQ ID NO: 683 - DNA, 30 bp, synthetic construct
  misc_feature 1..30: note = Synthetic
  source 1..30: mol_type = other DNA
acgggtatgagaggagacgctgggagtctt

SEQ ID NO: 684 - DNA, 30 bp, synthetic construct
  misc_feature 1..30: note = Synthetic
  source 1..30: mol_type = other DNA
ctagaccgcagaggagacttcagctccgcg

SEQ ID NO: 685 - DNA, 30 bp, synthetic construct
  misc_feature 1..30: note = Synthetic
  source 1..30: mol_type = other DNA
atgtaccacagaggagacatgacttcggtg

SEQ ID NO: 686 - DNA, 30 bp, synthetic construct
  misc_feature 1..30: note = Synthetic
  source 1..30: mol_type = other DNA
gggtcgatgagaggagacttgcattcgacg

SEQ ID NO: 687 - DNA, 30 bp, synthetic construct
  misc_feature 1..30: note = Synthetic
  source 1..30: mol_type = other DNA
tcgtcgtccagaggagacttcagctctgtt

SEQ ID NO: 688 - DNA, 30 bp, synthetic construct
  misc_feature 1..30: note = Synthetic
  source 1..30: mol_type = other DNA
acgggtacgagaggagacttgcatacttat

SEQ ID NO: 689 - DNA, 30 bp, synthetic construct
  misc_feature 1..30: note = Synthetic
  source 1..30: mol_type = other DNA
tacacccaaagaggagaccttgccaccgtc

SEQ ID NO: 690 - DNA, 30 bp, synthetic construct
  misc_feature 1..30: note = Synthetic
  source 1..30: mol_type = other DNA
acggatgttagaggagaccggatgtatgtg

SEQ ID NO: 691 - DNA, 30 bp, synthetic construct; identical to SEQ ID NO: 220
  misc_feature 1..30: note = Synthetic
  source 1..30: mol_type = other DNA

SEQ ID NO: 692 - DNA, 30 bp, synthetic construct
  misc_feature 1..30: note = Synthetic
  source 1..30: mol_type = other DNA
tcgaactccagaggagacctatcggtaaac

SEQ ID NO: 693 - DNA, 30 bp, synthetic construct
  misc_feature 1..30: note = Synthetic
  source 1..30: mol_type = other DNA
cagtctgggagaggagaccagatgacgttg

SEQ ID NO: 694 - DNA, 30 bp, synthetic construct
  misc_feature 1..30: note = Synthetic
  source 1..30: mol_type = other DNA
atgaacaccagaggagacttgcaacaatcg

SEQ ID NO: 695 - DNA, 30 bp, synthetic construct
  misc_feature 1..30: note = Synthetic
  source 1..30: mol_type = other DNA
gcgggatcaagaggagacctacaaacggtg

SEQ ID NO: 696 - DNA, 30 bp, synthetic construct
  misc_feature 1..30: note = Synthetic
  source 1..30: mol_type = other DNA
tcgaacatgagaggagaccaaacttacgtc

SEQ ID NO: 697 - DNA, 30 bp, synthetic construct
  misc_feature 1..30: note = Synthetic
  source 1..30: mol_type = other DNA
acgccaagtagaggagacatgtccaacgtc

SEQ ID NO: 698 - DNA, 30 bp, synthetic construct
  misc_feature 1..30: note = Synthetic
  source 1..30: mol_type = other DNA
aacagcacaagaggagacctacacatggca

SEQ ID NO: 699 - DNA, 30 bp, synthetic construct
  misc_feature 1..30: note = Synthetic
  source 1..30: mol_type = other DNA
gctaacaccagaggagacctctcagtcagt

SEQ ID NO: 700 - DNA, 30 bp, synthetic construct
  misc_feature 1..30: note = Synthetic
  source 1..30: mol_type = other DNA
accgaccgaagaggagacaccggcttactg

SEQ ID NO: 701 - DNA, 30 bp, synthetic construct
  misc_feature 1..30: note = Synthetic
  source 1..30: mol_type = other DNA
gacggcgtaagaggagaccgtgcaacatgg

SEQ ID NO: 702 - DNA, 30 bp, synthetic construct
  misc_feature 1..30: note = Synthetic
  source 1..30: mol_type = other DNA
gagaatcgtagaggagactttaataatacg

SEQ ID NO: 703 - DNA, 30 bp, synthetic construct
  misc_feature 1..30: note = Synthetic
  source 1..30: mol_type = other DNA
gagcctagtagaggagacaggatggtgttg

SEQ ID NO: 704 - DNA, 30 bp, synthetic construct
  misc_feature 1..30: note = Synthetic
  source 1..30: mol_type = other DNA
agcggcgttagaggagaccggatcataatc

SEQ ID NO: 705 - DNA, 30 bp, synthetic construct
  misc_feature 1..30: note = Synthetic
  source 1..30: mol_type = other DNA
acgtcgatgagaggagactatacgcatgtt

SEQ ID NO: 706 - DNA, 30 bp, synthetic construct
  misc_feature 1..30: note = Synthetic
  source 1..30: mol_type = other DNA
gcgtcgagtagaggagacttgactgttatt

SEQ ID NO: 707 - DNA, 30 bp, synthetic construct
  misc_feature 1..30: note = Synthetic
  source 1..30: mol_type = other DNA
gagacgcgtagaggagacctgtcgcttcag

SEQ ID NO: 708 - DNA, 30 bp, synthetic construct
  misc_feature 1..30: note = Synthetic
  source 1..30: mol_type = other DNA
aacaacgcaagaggagaccaatcaatgcac

SEQ ID NO: 709 - DNA, 30 bp, synthetic construct
  misc_feature 1..30: note = Synthetic
  source 1..30: mol_type = other DNA
acggataggagaggagactctagtgcgctt

SEQ ID NO: 710 - DNA, 30 bp, synthetic construct
  misc_feature 1..30: note = Synthetic
  source 1..30: mol_type = other DNA
tcaagccaaagaggagacttgacaggtgtg

SEQ ID NO: 711 - DNA, 30 bp, synthetic construct
  misc_feature 1..30: note = Synthetic
  source 1..30: mol_type = other DNA
cagacggctagaggagacgttatggttcat

SEQ ID NO: 712 - DNA, 30 bp, synthetic construct
  misc_feature 1..30: note = Synthetic
  source 1..30: mol_type = other DNA
gtgtcgcagagaggagacctgaatgctgtt

SEQ ID NO: 713 - DNA, 30 bp, synthetic construct
  misc_feature 1..30: note = Synthetic
  source 1..30: mol_type = other DNA
acgatgaccagaggagacctcgctgctaac

SEQ ID NO: 714 - DNA, 30 bp, synthetic construct
  misc_feature 1..30: note = Synthetic
  source 1..30: mol_type = other DNA
aatgcttcgagaggagaccattcgtcgttg

SEQ ID NO: 715 - DNA, 30 bp, synthetic construct
  misc_feature 1..30: note = Synthetic
  source 1..30: mol_type = other DNA
tcaaacaccagaggagacatgggcctcacg

SEQ ID NO: 716 - DNA, 30 bp, synthetic construct
  misc_feature 1..30: note = Synthetic
  source 1..30: mol_type = other DNA
atgtattcgagaggagacactcatagtctg

SEQ ID NO: 717 - DNA, 30 bp, synthetic construct
  misc_feature 1..30: note = Synthetic
  source 1..30: mol_type = other DNA
gcggatcagagaggagacagggctccgctt

SEQ ID NO: 718 - DNA, 30 bp, synthetic construct
  misc_feature 1..30: note = Synthetic
  source 1..30: mol_type = other DNA
caagaaaggagaggagactacacctctatg

SEQ ID NO: 719 - DNA, 30 bp, synthetic construct
  misc_feature 1..30: note = Synthetic
  source 1..30: mol_type = other DNA
tcccaaaacagaggagacctagccaacacg

SEQ ID NO: 720 - DNA, 30 bp, synthetic construct; identical to SEQ ID NO: 236
  misc_feature 1..30: note = Synthetic
  source 1..30: mol_type = other DNA

SEQ ID NO: 721 - DNA, 30 bp, synthetic construct
  misc_feature 1..30: note = Synthetic
  source 1..30: mol_type = other DNA
caaggcggaagaggagacctgagtacactg

SEQ ID NO: 722 - DNA, 30 bp, synthetic construct
  misc_feature 1..30: note = Synthetic
  source 1..30: mol_type = other DNA
tcgaataggagaggagacactgagatgcag

SEQ ID NO: 723 - DNA, 30 bp, synthetic construct
  misc_feature 1..30: note = Synthetic
  source 1..30: mol_type = other DNA
tcgggtagtagaggagacgtgagtgctttg

SEQ ID NO: 724 - DNA, 30 bp, synthetic construct
  misc_feature 1..30: note = Synthetic
  source 1..30: mol_type = other DNA
gagtcgacgagaggagaccgtggtacgctg

SEQ ID NO: 725 - DNA, 30 bp, synthetic construct
  misc_feature 1..30: note = Synthetic
  source 1..30: mol_type = other DNA
tcggcggtgagaggagacgcggcgcttcat

SEQ ID NO: 726 - DNA, 30 bp, synthetic construct
  misc_feature 1..30: note = Synthetic
  source 1..30: mol_type = other DNA
ctgagcagcagaggagacgttaaccgcctt

SEQ ID NO: 727 - DNA, 30 bp, synthetic construct
  misc_feature 1..30: note = Synthetic
  source 1..30: mol_type = other DNA
gagcagaggagaggagacattcagactatt

SEQ ID NO: 728 - DNA, 30 bp, synthetic construct
  misc_feature 1..30: note = Synthetic
  source 1..30: mol_type = other DNA
gctgcgtatagaggagacgcgcatgttctt

SEQ ID NO: 729 - DNA, 30 bp, synthetic construct
  misc_feature 1..30: note = Synthetic
  source 1..30: mol_type = other DNA
tcgccggtgagaggagaccatggggctttg

SEQ ID NO: 730 - DNA, 30 bp, synthetic construct
  misc_feature 1..30: note = Synthetic
  source 1..30: mol_type = other DNA
gattcgaggagaggagactatgcgaatctg

SEQ ID NO: 731 - DNA, 30 bp, synthetic construct
  misc_feature 1..30: note = Synthetic
  source 1..30: mol_type = other DNA
ttgagtcggagaggagactatcaggagttg

SEQ ID NO: 732 - DNA, 30 bp, synthetic construct
  misc_feature 1..30: note = Synthetic
  source 1..30: mol_type = other DNA
tcctacgcaagaggagacgtccactccatc

SEQ ID NO: 733 - DNA, 30 bp, synthetic construct
  misc_feature 1..30: note = Synthetic
  source 1..30: mol_type = other DNA
gactcacgcagaggagacgcgtcgtaccac

SEQ ID NO: 734 - DNA, 30 bp, synthetic construct
  misc_feature 1..30: note = Synthetic
  source 1..30: mol_type = other DNA
aaccaccaaagaggagacctgagctcgagt

SEQ ID NO: 735 - DNA, 30 bp, synthetic construct
  misc_feature 1..30: note = Synthetic
  source 1..30: mol_type = other DNA
tcctcaacgagaggagaccacctgtctttg

SEQ ID NO: 736 - DNA, 30 bp, synthetic construct
  misc_feature 1..30: note = Synthetic
  source 1..30: mol_type = other DNA
tcgtggaacagaggagacatatctggcctt

SEQ ID NO: 737 - DNA, 30 bp, synthetic construct
  misc_feature 1..30: note = Synthetic
  source 1..30: mol_type = other DNA
acgggtactagaggagacctggggacgatg

SEQ ID NO: 738 - DNA, 30 bp, synthetic construct
  misc_feature 1..30: note = Synthetic
  source 1..30: mol_type = other DNA
cagcagcttagaggagacacgcatactctt

SEQ ID NO: 739 - DNA, 30 bp, synthetic construct
  misc_feature 1..30: note = Synthetic
  source 1..30: mol_type = other DNA
gcggggttgagaggagaccgtgattcgctt

SEQ ID NO: 740 - DNA, 30 bp, synthetic construct
  misc_feature 1..30: note = Synthetic
  source 1..30: mol_type = other DNA
caggtttatagaggagaccgggatcagttg

SEQ ID NO: 741 - DNA, 30 bp, synthetic construct
  misc_feature 1..30: note = Synthetic
  source 1..30: mol_type = other DNA
gcaggagtaagaggagacagagtgaccatc

SEQ ID NO: 742 - DNA, 30 bp, synthetic construct
  misc_feature 1..30: note = Synthetic
  source 1..30: mol_type = other DNA
aactcagccagaggagaccttctgcactcc

SEQ ID NO: 743 - DNA, 30 bp, synthetic construct
  misc_feature 1..30: note = Synthetic
  source 1..30: mol_type = other DNA
aaccacagtagaggagacctgacaggcgtt

SEQ ID NO: 744 - DNA, 30 bp, synthetic construct
  misc_feature 1..30: note = Synthetic
  source 1..30: mol_type = other DNA
aacgcttacagaggagacacatccgcgttc

SEQ ID NO: 745 - DNA, 30 bp, synthetic construct
  misc_feature 1..30: note = Synthetic
  source 1..30: mol_type = other DNA
tcggctaacagaggagacataatgcacacg

SEQ ID NO: 746 - DNA, 30 bp, synthetic construct
  misc_feature 1..30: note = Synthetic
  source 1..30: mol_type = other DNA
caatccgccagaggagacctcgtcagttac

SEQ ID NO: 747 - DNA, 30 bp, synthetic construct
  misc_feature 1..30: note = Synthetic
  source 1..30: mol_type = other DNA
gatagtaggagaggagacgctagttatcat

SEQ ID NO: 748 - DNA, 30 bp, synthetic construct
  misc_feature 1..30: note = Synthetic
  source 1..30: mol_type = other DNA
tcgtttgtgagaggagacgttcgtacgctg

SEQ ID NO: 749 - DNA, 30 bp, synthetic construct
  misc_feature 1..30: note = Synthetic
  source 1..30: mol_type = other DNA
agcgacatgagaggagaccgatctgtgtac

SEQ ID NO: 750 - DNA, 30 bp, synthetic construct
  misc_feature 1..30: note = Synthetic
  source 1..30: mol_type = other DNA
tccggaatcagaggagaccgctacccaata

SEQ ID NO: 751 - DNA, 30 bp, synthetic construct
  misc_feature 1..30: note = Synthetic
  source 1..30: mol_type = other DNA
tccaacgtcagaggagacatggctcacagc

SEQ ID NO: 752 - DNA, 30 bp, synthetic construct
  misc_feature 1..30: note = Synthetic
  source 1..30: mol_type = other DNA
actgaggttagaggagaccgttcgcaggtt

SEQ ID NO: 753 - DNA, 30 bp, synthetic construct
  misc_feature 1..30: note = Synthetic
  source 1..30: mol_type = other DNA
gcgagcagcagaggagacctgcaacaaacg

SEQ ID NO: 754 - DNA, 30 bp, synthetic construct
  misc_feature 1..30: note = Synthetic
  source 1..30: mol_type = other DNA
cagtctgctagaggagaccttgtgtcttat

SEQ ID NO: 755 - DNA, 30 bp, synthetic construct
  misc_feature 1..30: note = Synthetic
  source 1..30: mol_type = other DNA
gacgcatctagaggagaccgaacatccctc

SEQ ID NO: 756 - DNA, 30 bp, synthetic construct
  misc_feature 1..30: note = Synthetic
  source 1..30: mol_type = other DNA
aacagtgtcagaggagacctcaaccaaact

SEQ ID NO: 757 - protein, 10 aa, synthetic construct
  REGION 1..10: note = Synthetic
TTGRGDQARL

SEQ ID NO: 758 - protein, 10 aa, synthetic construct
  REGION 1..10: note = Synthetic
TTLRGDHSQL

SEQ ID NO: 759 - protein, 10 aa, synthetic construct
  REGION 1..10: note = Synthetic
TNLRGDYQLT

SEQ ID NO: 760 - protein, 10 aa, synthetic construct
  REGION 1..10: note = Synthetic
STSRGDYVTH

SEQ ID NO: 761 - protein, 10 aa, synthetic construct
  REGION 1..10: note = Synthetic
MPARGDLVQT

SEQ ID NO: 762 - protein, 10 aa, synthetic construct
  REGION 1..10: note = Synthetic
SGVRGDRLAV

SEQ ID NO: 763 - protein, 10 aa, synthetic construct
  REGION 1..10: note = Synthetic
SNERGDQHRL

SEQ ID NO: 764 - protein, 10 aa, synthetic construct
  REGION 1..10: note = Synthetic
STLRGDYAVS

SEQ ID NO: 765 - protein, 10 aa, synthetic construct
  REGION 1..10: note = Synthetic
SNARGDIMTT

SEQ ID NO: 766 - protein, 10 aa, synthetic construct
  REGION 1..10: note = Synthetic
EASRGDLQMR

SEQ ID NO: 767 - protein, 10 aa, synthetic construct
  REGION 1..10: note = Synthetic
TYARGDLSGH

SEQ ID NO: 768 - protein, 10 aa, synthetic construct
  REGION 1..10: note = Synthetic
DSSRGDRSSV

SEQ ID NO: 769 - protein, 10 aa, synthetic construct
  REGION 1..10: note = Synthetic
SQSRGDLVPL

SEQ ID NO: 770 - protein, 10 aa, synthetic construct
  REGION 1..10: note = Synthetic
SATRGDYSIL

SEQ ID NO: 771 - protein, 10 aa, synthetic construct
  REGION 1..10: note = Synthetic
QATRGDLQHT

SEQ ID NO: 772 - protein, 10 aa, synthetic construct
  REGION 1..10: note = Synthetic
HDDRGDRRML

SEQ ID NO: 773 - protein, 10 aa, synthetic construct
  REGION 1..10: note = Synthetic
SSHRGDLLAT

SEQ ID NO: 774 - protein, 10 aa, synthetic construct
  REGION 1..10: note = Synthetic
SYQRGDQHNM

SEQ ID NO: 775 - protein, 10 aa, synthetic construct
  REGION 1..10: note = Synthetic
SHQRGDYNTL

SEQ ID NO: 776 - protein, 10 aa, synthetic construct
  REGION 1..10: note = Synthetic
MDQRGDMSVV

SEQ ID NO: 777 - protein, 10 aa, synthetic construct
  REGION 1..10: note = Synthetic
QIARGDLHVP

SEQ ID NO: 778 - protein, 10 aa, synthetic construct
  REGION 1..10: note = Synthetic
TYTRGDQHMM

SEQ ID NO: 779 - protein, 10 aa, synthetic construct
  REGION 1..10: note = Synthetic
DASRGDRTSL

SEQ ID NO: 780 - protein, 10 aa, synthetic construct
  REGION 1..10: note = Synthetic
SDRRGDLHPQ

SEQ ID NO: 781 - protein, 10 aa, synthetic construct
  REGION 1..10: note = Synthetic
SATRGDHSTL

SEQ ID NO: 782 - protein, 10 aa, synthetic construct
  REGION 1..10: note = Synthetic
AYQRGDFTSV

SEQ ID NO: 783 - protein, 10 aa, synthetic construct
  REGION 1..10: note = Synthetic
TGNRGDLQSV

SEQ ID NO: 784 - protein, 10 aa, synthetic construct
  REGION 1..10: note = Synthetic
AWRRGDLENA

SEQ ID NO: 785 - protein, 10 aa, synthetic construct
  REGION 1..10: note = Synthetic
NAARGDHGLL

SEQ ID NO: 786 - protein, 10 aa, synthetic construct
  REGION 1..10: note = Synthetic
SYSRGDHQAL

SEQ ID NO: 787 - protein, 10 aa, synthetic construct
  REGION 1..10: note = Synthetic
DGVRGDRTVV

SEQ ID NO: 788 - protein, 10 aa, synthetic construct
  REGION 1..10: note = Synthetic
SSERGDKMST

SEQ ID NO: 789 - protein, 10 aa, synthetic construct
  REGION 1..10: note = Synthetic
TSMRGDYTHV

SEQ ID NO: 790 - protein, 10 aa, synthetic construct
  REGION 1..10: note = Synthetic
SGVRGDRIII

SEQ ID NO: 791 - protein, 10 aa, synthetic construct
  REGION 1..10: note = Synthetic
ENRRGDAQLL

SEQ ID NO: 792 - protein, 10 aa, synthetic construct
  REGION 1..10: note = Synthetic
TVYRGDREQH

SEQ ID NO: 793 - protein, 10 aa, synthetic construct
  REGION 1..10: note = Synthetic
LDRRGDLLNS

SEQ ID NO: 794 - protein, 10 aa, synthetic construct
  REGION 1..10: note = Synthetic
ESVRGDLRST

SEQ ID NO: 795 - protein, 10 aa, synthetic construct
  REGION 1..10: note = Synthetic
DKYRGDQRGL

SEQ ID NO: 796 - protein, 10 aa, synthetic construct
  REGION 1..10: note = Synthetic
TDRRGDAHIL

SEQ ID NO: 797 - protein, 10 aa, synthetic construct
  REGION 1..10: note = Synthetic
SQTRGDTSLM

SEQ ID NO: 798 - protein, 10 aa, synthetic construct
  REGION 1..10: note = Synthetic
DATRGDTRML

SEQ ID NO: 799 - protein, 10 aa, synthetic construct
  REGION 1..10: note = Synthetic
SMQRGDLTHA

SEQ ID NO: 800 - protein, 10 aa, synthetic construct
  REGION 1..10: note = Synthetic
SGTRGDTLIL

SEQ ID NO: 801 - protein, 10 aa, synthetic construct
  REGION 1..10: note = Synthetic
ANTRGDHQNF

SEQ ID NO: 802 - protein, 10 aa, synthetic construct
  REGION 1..10: note = Synthetic
TSQRGDHTQL

SEQ ID NO: 803 - protein, 10 aa, synthetic construct
  REGION 1..10: note = Synthetic
SHWRGDTSSL

SEQ ID NO: 804 - protein, 10 aa, synthetic construct
  REGION 1..10: note = Synthetic
ISGRGDRQEL

SEQ ID NO: 805 - protein, 10 aa, synthetic construct
  REGION 1..10: note = Synthetic
SVLRGDIGTI

SEQ ID NO: 806 - protein, 10 aa, synthetic construct
  REGION 1..10: note = Synthetic
QDSRGDLSGK

SEQ ID NO: 807 - protein, 10 aa, synthetic construct
  REGION 1..10: note = Synthetic
KPIRGDGAEL

SEQ ID NO: 808 - protein, 10 aa, synthetic construct
  REGION 1..10: note = Synthetic
TYMRGDLQHT

SEQ ID NO: 809 - protein, 10 aa, synthetic construct
  REGION 1..10: note = Synthetic
TELRGDLSST

SEQ ID NO: 810 - protein, 10 aa, synthetic construct
  REGION 1..10: note = Synthetic
SAMRGDHAVL

SEQ ID NO: 811 - protein, 10 aa, synthetic construct
  REGION 1..10: note = Synthetic
SWVRGDASTL

SEQ ID NO: 812 - protein, 10 aa, synthetic construct
  REGION 1..10: note = Synthetic
QYARGDPHAL

SEQ ID NO: 813 - protein, 10 aa, synthetic construct
  REGION 1..10: note = Synthetic
STNRGDIVVH

SEQ ID NO: 814 - protein, 10 aa, synthetic construct
  REGION 1..10: note = Synthetic
VNIRGDLHQT

SEQ ID NO: 815 - protein, 10 aa, synthetic construct
  REGION 1..10: note = Synthetic
REYRGDSSIL

SEQ ID NO: 816 - protein, 10 aa, synthetic construct
  REGION 1..10: note = Synthetic
STLRGDGSMM

SEQ ID NO: 817 - protein, 10 aa, synthetic construct
  REGION 1..10: note = Synthetic
SSQRGDITAH

SEQ ID NO: 818 - protein, 10 aa, synthetic construct
  REGION 1..10: note = Synthetic
TEFRGDRSTV

SEQ ID NO: 819 - protein, 10 aa, synthetic construct
  REGION 1..10: note = Synthetic
TSTRGDYVTV

SEQ ID NO: 820 - protein, 10 aa, synthetic construct
  REGION 1..10: note = Synthetic
NHLRGDVSAI

SEQ ID NO: 821 - protein, 10 aa, synthetic construct
  REGION 1..10: note = Synthetic
LERRGDLVST

SEQ ID NO: 822 - protein, 10 aa, synthetic construct
  REGION 1..10: note = Synthetic
NEYRGDHSHP

SEQ ID NO: 823 - protein, 10 aa, synthetic construct
  REGION 1..10: note = Synthetic
NWQRGDTSTL

SEQ ID NO: 824 - protein, 10 aa, synthetic construct
  REGION 1..10: note = Synthetic
TDSRGDRTVL

SEQ ID NO: 825 - protein, 10 aa, synthetic construct
  REGION 1..10: note = Synthetic
YAVRGDQHTI

SEQ ID NO: 826 - protein, 10 aa, synthetic construct
  REGION 1..10: note = Synthetic
FGVRGDTRDL

SEQ ID NO: 827 - protein, 10 aa, synthetic construct
  REGION 1..10: note = Synthetic
SSARGDTGML

SEQ ID NO: 828 - protein, 10 aa, synthetic construct
  REGION 1..10: note = Synthetic
SAMRGDQMGQ

SEQ ID NO: 829 - protein, 10 aa, synthetic construct
  REGION 1..10: note = Synthetic
SHTRGDLVTT

SEQ ID NO: 830 - protein, 10 aa, synthetic construct
  REGION 1..10: note = Synthetic
VTTRGDTAIL

SEQ ID NO: 831 - protein, 10 aa, synthetic construct
  REGION 1..10: note = Synthetic
EPTRGDRHSI

SEQ ID NO: 832 - protein, 10 aa, synthetic construct
  REGION 1..10: note = Synthetic
GSQRGDRLVL

SEQ ID NO: 833 - protein, 10 aa, synthetic construct
  REGION 1..10: note = Synthetic
QHYRGDLSTT

SEQ ID NO: 834 - protein, 10 aa, synthetic construct
  REGION 1..10: note = Synthetic
METRGDRQQL

SEQ ID NO: 835 - protein, 10 aa, synthetic construct
  REGION 1..10: note = Synthetic
EALRGDKVVL

SEQ ID NO: 836 - protein, 10 aa, synthetic construct
  REGION 1..10: note = Synthetic
NAVRGDQSYV

SEQ ID NO: 837 - protein, 10 aa, synthetic construct
  REGION 1..10: note = Synthetic
SPLRGDNRAL

SEQ ID NO: 838 - protein, 10 aa, synthetic construct
  REGION 1..10: note = Synthetic
ENRRGDTHAL

SEQ ID NO: 839 - protein, 10 aa, synthetic construct
  REGION 1..10: note = Synthetic
NSQRGDLTGT

SEQ ID NO: 840 - protein, 9 aa, synthetic construct
  REGION 1..9: note = Synthetic
QYAPSQGTV

SEQ ID NO: 841 - protein, 10 aa, synthetic construct
  REGION 1..10: note = Synthetic
DNSRGDHSRL

SEQ ID NO: 842 - protein, 10 aa, synthetic construct
  REGION 1..10: note = Synthetic
NTHRGDYASI

SEQ ID NO: 843 - protein, 10 aa, synthetic construct
  REGION 1..10: note = Synthetic
HTTRGDQQPL

SEQ ID NO: 844 - protein, 10 aa, synthetic construct
  REGION 1..10: note = Synthetic
EWRRGDQTAL

SEQ ID NO: 845 - protein, 10 aa, synthetic construct
  REGION 1..10: note = Synthetic
TAVRGDQTTV

SEQ ID NO: 846 - protein, 10 aa, synthetic construct
  REGION 1..10: note = Synthetic
EYLRGDRISQ

SEQ ID NO: 847 - protein, 10 aa, synthetic construct
  REGION 1..10: note = Synthetic
SRYRGDQETI

SEQ ID NO: 848 - protein, 10 aa, synthetic construct
  REGION 1..10: note = Synthetic
ASLRGDTVTL

SEQ ID NO: 849 - protein, 10 aa, synthetic construct
  REGION 1..10: note = Synthetic
VGVRGDSHVL

SEQ ID NO: 850 - protein, 10 aa, synthetic construct
  REGION 1..10: note = Synthetic
TNSRGDHTSL

SEQ ID NO: 851 - protein, 10 aa, synthetic construct
  REGION 1..10: note = Synthetic
VDQRGDQRAL

SEQ ID NO: 852 - protein, 10 aa, synthetic construct
  REGION 1..10: note = Synthetic
ASVRGDRLDV

SEQ ID NO: 853 - protein, 10 aa, synthetic construct
  REGION 1..10: note = Synthetic
TSYRGDLSSN

SEQ ID NO: 854 - protein, 10 aa, synthetic construct
  REGION 1..10: note = Synthetic
TSDRGDSSNR

SEQ ID NO: 855 - protein, 10 aa, synthetic construct
  REGION 1..10: note = Synthetic
SYMRGDLDMR

SEQ ID NO: 856 - protein, 10 aa, synthetic construct
  REGION 1..10: note = Synthetic
TDVRGDRSMI

SEQ ID NO: 857 - protein, 10 aa, synthetic construct
  REGION 1..10: note = Synthetic
SYVRGDSSTV

SEQ ID NO: 858 - protein, 10 aa, synthetic construct
  REGION 1..10: note = Synthetic
QVYRGDRESV

SEQ ID NO: 859 - protein, 10 aa, synthetic construct
  REGION 1..10: note = Synthetic
TDRRGDAVSF

SEQ ID NO: 860 - protein, 10 aa, synthetic construct
  REGION 1..10: note = Synthetic
TNSRGDLHTT

SEQ ID NO: 861 - protein, 10 aa, synthetic construct
  REGION 1..10: note = Synthetic
EAIRGDFKTL

SEQ ID NO: 862 - protein, 10 aa, synthetic construct
  REGION 1..10: note = Synthetic
TGIRGDTAGL

SEQ ID NO: 863 - protein, 10 aa, synthetic construct
  REGION 1..10: note = Synthetic
TSSRGDVQSL

SEQ ID NO: 864 - protein, 10 aa, synthetic construct
  REGION 1..10: note = Synthetic
SSRRGDTNEL

SEQ ID NO: 865 - protein, 10 aa, synthetic construct
  REGION 1..10: note = Synthetic
SNARGDHTPL

SEQ ID NO: 866 - protein, 10 aa, synthetic construct
  REGION 1..10: note = Synthetic
SELRGDRSPY

SEQ ID NO: 867 - protein, 10 aa, synthetic construct
  REGION 1..10: note = Synthetic
VHARGDTSIM

SEQ ID NO: 868 - protein, 10 aa, synthetic construct
  REGION 1..10: note = Synthetic
SALRGDHGTL

SEQ ID NO: 869 - protein, 10 aa, synthetic construct
  REGION 1..10: note = Synthetic
QTGRGDIAGM

SEQ ID NO: 870 - protein, 10 aa, synthetic construct
  REGION 1..10: note = Synthetic
TVARGDQIRL

SEQ ID NO: 871 - protein, 10 aa, synthetic construct
  REGION 1..10: note = Synthetic
TNSRGDSVAL

SEQ ID NO: 872 - protein, 10 aa, synthetic construct
  REGION 1..10: note = Synthetic
QNARGDSAVI

SEQ ID NO: 873 - protein, 10 aa, synthetic construct
  REGION 1..10: note = Synthetic
HYLRGDTTTL

SEQ ID NO: 874 - protein, 10 aa, synthetic construct
  REGION 1..10: note = Synthetic
ANARGDLQNT

SEQ ID NO: 875 - protein, 10 aa, synthetic construct
  REGION 1..10: note = Synthetic
QNIRGDIRTV

SEQ ID NO: 876 - protein, 10 aa, synthetic construct
  REGION 1..10: note = Synthetic
AALRGDHGQM

SEQ ID NO: 877 - protein, 10 aa, synthetic construct
  REGION 1..10: note = Synthetic
TTDRGDLSAR

SEQ ID NO: 878 - protein, 10 aa, synthetic construct
  REGION 1..10: note = Synthetic
LNVRGDLVHT

SEQ ID NO: 879 - protein, 10 aa, synthetic construct
  REGION 1..10: note = Synthetic
YSTRGDHTVL

SEQ ID NO: 880 - protein, 10 aa, synthetic construct
  REGION 1..10: note = Synthetic
TNARGDLTVS

SEQ ID NO: 881 - protein, 10 aa, synthetic construct
  REGION 1..10: note = Synthetic
TNARGDYTAL

SEQ ID NO: 882 - protein, 10 aa, synthetic construct
  REGION 1..10: note = Synthetic
AEGRGDTRGS

SEQ ID NO: 883 - protein, 10 aa, synthetic construct
  REGION 1..10: note = Synthetic
TNIRGDQSSV

SEQ ID NO: 884 - protein, 10 aa, synthetic construct
  REGION 1..10: note = Synthetic
VDRRGDTMTM

SEQ ID NO: 885 - protein, 10 aa, synthetic construct
  REGION 1..10: note = Synthetic
QIGRGDVTPL

SEQ ID NO: 886 - protein, 10 aa, synthetic construct
  REGION 1..10: note = Synthetic
MQARGDLLGV

SEQ ID NO: 887 - protein, 10 aa, synthetic construct
  REGION 1..10: note = Synthetic
NTQRGDYASV

SEQ ID NO: 888 - protein, 10 aa, synthetic construct
  REGION 1..10: note = Synthetic
SDTRGDRITQ

SEQ ID NO: 889 - protein, 10 aa, synthetic construct
  REGION 1..10: note = Synthetic
SAIRGDYRDV

SEQ ID NO: 890 - protein, 10 aa, synthetic construct
  REGION 1..10: note = Synthetic
VGVRGDVHPL

SEQ ID NO: 891 - protein, 10 aa, synthetic construct
  REGION 1..10: note = Synthetic
TVLRGDAERL

SEQ ID NO: 892 - protein, 10 aa, synthetic construct
  REGION 1..10: note = Synthetic
ASTRGDLSGQ

SEQ ID NO: 893 - protein, 10 aa, synthetic construct
  REGION 1..10: note = Synthetic
DSRRGDGQNL

SEQ ID NO: 894 - protein, 10 aa, synthetic construct
  REGION 1..10: note = Synthetic
IDKRGDIQGL

SEQ ID NO: 895 - protein, 10 aa, synthetic construct
  REGION 1..10: note = Synthetic
TVTRGDLLVN

SEQ ID NO: 896 - protein, 10 aa, synthetic construct
  REGION 1..10: note = Synthetic
DSTRGDRLGL

SEQ ID NO: 897 - protein, 10 aa, synthetic construct
  REGION 1..10: note = Synthetic
AANRGDYASL

SEQ ID NO: 898 - protein, 10 aa, synthetic construct
  REGION 1..10: note = Synthetic
RDYRGDTSSL

SEQ ID NO: 899 - protein, 10 aa, synthetic construct
  REGION 1..10: note = Synthetic
SNIRGDASLH

SEQ ID NO: 900 - protein, 10 aa, synthetic construct
  REGION 1..10: note = Synthetic
NLQRGDRTDF

SEQ ID NO: 901 - protein, 10 aa, synthetic construct
  REGION 1..10: note = Synthetic
NASRGDHSSM

SEQ ID NO: 902 - protein, 10 aa, synthetic construct
  REGION 1..10: note = Synthetic
TSMRGDYTHV

SEQ ID NO: 903 - protein, 10 aa, synthetic construct
  REGION 1..10: note = Synthetic
TSRRGDLNDV

SEQ ID NO: 904 - protein, 10 aa, synthetic construct
  REGION 1..10: note = Synthetic
QSHRGDVQSL

SEQ ID NO: 905 - protein, 10 aa, synthetic construct
  REGION 1..10: note = Synthetic
STTRGDYQSV

SEQ ID NO: 906 - protein, 10 aa, synthetic construct
  REGION 1..10: note = Synthetic
YSTRGDHAML

SEQ ID NO: 907 - protein, 10 aa, synthetic construct
  REGION 1..10: note = Synthetic
TSARGDLIHT

SEQ ID NO: 908 - protein, 10 aa, synthetic construct
  REGION 1..10: note = Synthetic
ATARGDRESF

SEQ ID NO: 909 - protein, 10 aa, synthetic construct
  REGION 1..10: note = Synthetic
ASTRGDYSTM

SEQ ID NO: 910 - protein, 10 aa, synthetic construct
  REGION 1..10: note = Synthetic
SNNRGDVQRL

SEQ ID NO: 911 - protein, 10 aa, synthetic construct
  REGION 1..10: note = Synthetic
ERLRGDQHII

SEQ ID NO: 912 - protein, 10 aa, synthetic construct
  REGION 1..10: note = Synthetic
SSIRGDHATL

SEQ ID NO: 913 - protein, 10 aa, synthetic construct
  REGION 1..10: note = Synthetic
NPTRGDIATV

SEQ ID NO: 914 - protein, 10 aa, synthetic construct
  REGION 1..10: note = Synthetic
MSTRGDLSVN

SEQ ID NO: 915 - protein, 10 aa, synthetic construct
  REGION 1..10: note = Synthetic
MDRRGDITYA

SEQ ID NO: 916 - protein, 10 aa, synthetic construct
  REGION 1..10: note = Synthetic
NATRGDLMSA

SEQ ID NO: 917 - protein, 10 aa, synthetic construct
  REGION 1..10: note = Synthetic
SDHRGDRTYQ

SEQ ID NO: 918 - protein, 10 aa, synthetic construct
  REGION 1..10: note = Synthetic
NWVRGDLSTA

SEQ ID NO: 919 - protein, 10 aa, synthetic construct
  REGION 1..10: note = Synthetic
SSHRGDLSAT

SEQ ID NO: 920 - protein, 10 aa, synthetic construct
  REGION 1..10: note = Synthetic
NATRGDYREI

SEQ ID NO: 921 - protein, 10 aa, synthetic construct
  REGION 1..10: note = Synthetic
DTLRGDLQTA

SEQ ID NO: 922 - protein, 10 aa, synthetic construct
  REGION 1..10: note = Synthetic
IAVRGDLTPV

SEQ ID NO: 923 - protein, 10 aa, synthetic construct
  REGION 1..10: note = Synthetic
TLLRGDLAHS

SEQ ID NO: 924 - protein, 10 aa, synthetic construct
  REGION 1..10: note = Synthetic
MNTRGDHTVL

SEQ ID NO: 925 - protein, 10 aa, synthetic construct
  REGION 1..10: note = Synthetic
TGHRGDIAVY

SEQ ID NO: 926 - protein, 10 aa, synthetic construct
  REGION 1..10: note = Synthetic
TSNRGDQMSN

SEQ ID NO: 927 - protein, 10 aa, synthetic construct
  REGION 1..10: note = Synthetic
SATRGDHTAI

SEQ ID NO: 928 - protein, 10 aa, synthetic construct
  REGION 1..10: note = Synthetic
SSVRGDREHA

SEQ ID NO: 929 - protein, 10 aa, synthetic construct
  REGION 1..10: note = Synthetic
TNSRGDLVVH

SEQ ID NO: 930 - protein, 10 aa, synthetic construct
  REGION 1..10: note = Synthetic
ETRRGDLSSQ

SEQ ID NO: 931 - protein, 10 aa, synthetic construct
  REGION 1..10: note = Synthetic
TYARGDITLT

SEQ ID NO: 932 - protein, 10 aa, synthetic construct
  REGION 1..10: note = Synthetic
SASRGDTLHL

SEQ ID NO: 933 - protein, 10 aa, synthetic construct
  REGION 1..10: note = Synthetic
DNQRGDLSSR

SEQ ID NO: 934 - protein, 10 aa, synthetic construct
  REGION 1..10: note = Synthetic
TQSRGDLRDA

SEQ ID NO: 935 - protein, 10 aa, synthetic construct
  REGION 1..10: note = Synthetic
ENRRGDLTNA

SEQ ID NO: 936 - protein, 10 aa, synthetic construct
  REGION 1..10: note = Synthetic
TSIRGDISSV

SEQ ID NO: 937 - protein, 10 aa, synthetic construct
  REGION 1..10: note = Synthetic
ISARGDTMTL

SEQ ID NO: 938 - protein, 10 aa, synthetic construct
  REGION 1..10: note = Synthetic
SRVRGDQDHW

SEQ ID NO: 939 - protein, 10 aa, synthetic construct
  REGION 1..10: note = Synthetic
SGNRGDIASY

SEQ ID NO: 940 - protein, 10 aa, synthetic construct
  REGION 1..10: note = Synthetic
NEQRGDRYNH

SEQ ID NO: 941 - protein, 10 aa, synthetic construct
  REGION 1..10: note = Synthetic
EALRGDVRAL

SEQ ID NO: 942 - protein, 10 aa, synthetic construct
  REGION 1..10: note = Synthetic
VDRRGDYTQM

SEQ ID NO: 943 - protein, 10 aa, synthetic construct
  REGION 1..10: note = Synthetic
NNVRGDYTSV

SEQ ID NO: 944 - protein, 10 aa, synthetic construct
  REGION 1..10: note = Synthetic
QTYRGDASVL

SEQ ID NO: 945 - protein, 10 aa, synthetic construct
  REGION 1..10: note = Synthetic
SNYRGDHGSL

SEQ ID NO: 946 - protein, 10 aa, synthetic construct
  REGION 1..10: note = Synthetic
TSSRGDLREV

SEQ ID NO: 947 - protein, 10 aa, synthetic construct
  REGION 1..10: note = Synthetic
QYTRGDVSNL

SEQ ID NO: 948 - protein, 10 aa, synthetic construct
  REGION 1..10: note = Synthetic
SDLRGDVRER

SEQ ID NO: 949 - protein, 10 aa, synthetic construct
  REGION 1..10: note = Synthetic
QNARGDTTAL

SEQ ID NO: 950 - protein, 10 aa, synthetic construct
  REGION 1..10: note = Synthetic
NSLRGDRDTM

SEQ ID NO: 951 - protein, 10 aa, synthetic construct
  REGION 1..10: note = Synthetic
SNSRGDQAQV

SEQ ID NO: 952 - protein, 10 aa, synthetic construct
  REGION 1..10: note = Synthetic
EATRGDRSTL

SEQ ID NO: 953 - protein, 10 aa, synthetic construct
  REGION 1..10: note = Synthetic
VPQRGDITNL

SEQ ID NO: 954 - protein, 10 aa, synthetic construct
  REGION 1..10: note = Synthetic
DKIRGDLRSI

SEQ ID NO: 955 - protein, 10 aa, synthetic construct
  REGION 1..10: note = Synthetic
SAARGDYSIV

SEQ ID NO: 956 - protein, 10 aa, synthetic construct
  REGION 1..10: note = Synthetic
VGLRGDLIGQ

SEQ ID NO: 957 - protein, 10 aa, synthetic construct
  REGION 1..10: note = Synthetic
QAGRGDLTVI

SEQ ID NO: 958 - protein, 10 aa, synthetic construct
  REGION 1..10: note = Synthetic
SKTRGDFQEA

SEQ ID NO: 959 - protein, 10 aa, synthetic construct
  REGION 1..10: note = Synthetic
GTARGDYSML

SEQ ID NO: 960 - protein, 10 aa, synthetic construct
  REGION 1..10: note = Synthetic
ISTRGDLVTI

SEQ ID NO: 961 - protein, 10 aa, synthetic construct
  REGION 1..10: note = Synthetic
TGTRGDREYM

SEQ ID NO: 962 - protein, 10 aa, synthetic construct
  REGION 1..10: note = Synthetic
MTTRGDLSIT

SEQ ID NO: 963 - protein, 10 aa, synthetic construct
  REGION 1..10: note = Synthetic
STSRGDMTSV

SEQ ID NO: 964 - protein, 10 aa, synthetic construct
  REGION 1..10: note = Synthetic
GPARGDFTSS

SEQ ID NO: 965 - protein, 10 aa, synthetic construct
  REGION 1..10: note = Synthetic
VDRRGDLGHV

SEQ ID NO: 966 - protein, 10 aa, synthetic construct
  REGION 1..10: note = Synthetic
NSGRGDMSQL

SEQ ID NO: 967 - protein, 10 aa, synthetic construct
  REGION 1..10: note = Synthetic
SQGRGDLERY

SEQ ID NO: 968 - protein, 10 aa, synthetic construct
  REGION 1..10: note = Synthetic
VFGRGDQYTL

SEQ ID NO: 969 - protein, 10 aa, synthetic construct
  REGION 1..10: note = Synthetic
IVGRGDLHLQ

SEQ ID NO: 970 - protein, 10 aa, synthetic construct
  REGION 1..10: note = Synthetic
SYSRGDTSRL

SEQ ID NO: 971 - protein, 10 aa, synthetic construct
  REGION 1..10: note = Synthetic
MSSRGDRATI

SEQ ID NO: 972 - protein, 10 aa, synthetic construct
  REGION 1..10: note = Synthetic
MSSRGDLTRV

SEQ ID NO: 973 - protein, 10 aa, synthetic construct
  REGION 1..10: note = Synthetic
QHTRGDFGNL

SEQ ID NO: 974 - protein, 10 aa, synthetic construct
  REGION 1..10: note = Synthetic
ETRRGDLSSQ

SEQ ID NO: 975 - protein, 10 aa, synthetic construct
  REGION 1..10: note = Synthetic
TGTRGDLRAI

SEQ ID NO: 976 - protein, 10 aa, synthetic construct
  REGION 1..10: note = Synthetic
QMARGDLSTA

SEQ ID NO: 977 - protein, 10 aa, synthetic construct
  REGION 1..10: note = Synthetic
LVERGDRIMN

SEQ ID NO: 978 - protein, 10 aa, synthetic construct
  REGION 1..10: note = Synthetic
GLVRGDLNAR

SEQ ID NO: 979 - protein, 10 aa, synthetic construct
  REGION 1..10: note = Synthetic
NNPRGDLSSV

SEQ ID NO: 980 - protein, 10 aa, synthetic construct
  REGION 1..10: note = Synthetic
HEKRGDLSNS

SEQ ID NO: 981 - protein, 10 aa, synthetic construct
  REGION 1..10: note = Synthetic
SQARGDLHQT

SEQ ID NO: 982 - protein, 10 aa, synthetic construct
  REGION 1..10: note = Synthetic
FTGRGDLRTA

SEQ ID NO: 983 - protein, 10 aa, synthetic construct
  REGION 1..10: note = Synthetic
QSIRGDTGHL

SEQ ID NO: 984 - protein, 10 aa, synthetic construct
  REGION 1..10: note = Synthetic
SAGRGDMSVL

SEQ ID NO: 985 - protein, 10 aa, synthetic construct
  REGION 1..10: note = Synthetic
SERRGDEHKW

SEQ ID NO: 986 - protein, 10 aa, synthetic construct
  REGION 1..10: note = Synthetic
TTGRGDLVSL

SEQ ID NO: 987 - protein, 10 aa, synthetic construct
  REGION 1..10: note = Synthetic
LGLRGDQIGQ

SEQ ID NO: 988 - protein, 10 aa, synthetic construct
  REGION 1..10: note = Synthetic
VALRGDLTHQ

SEQ ID NO: 989 - protein, 10 aa, synthetic construct
  REGION 1..10: note = Synthetic
MIGRGDQAPL

SEQ ID NO: 990 - protein, 10 aa, synthetic construct
  REGION 1..10: note = Synthetic
FQARGDHSTL

SEQ ID NO: 991 - protein, 10 aa, synthetic construct
  REGION 1..10: note = Synthetic
NSVRGDHSSL

SEQ ID NO: 992 - protein, 10 aa, synthetic construct
  REGION 1..10: note = Synthetic
WPNRGDLQST

SEQ ID NO: 993 - protein, 10 aa, synthetic construct
  REGION 1..10: note = Synthetic
SASRGDYQTL

SEQ ID NO: 994 - protein, 10 aa, synthetic construct
  REGION 1..10: note = Synthetic
TMQRGDLHTI

SEQ ID NO: 995 - protein, 10 aa, synthetic construct
  REGION 1..10: note = Synthetic
TALRGDLAGT

SEQ ID NO: 996 - protein, 10 aa, synthetic construct
  REGION 1..10: note = Synthetic
VNARGDFSQT

SEQ ID NO: 997 - protein, 10 aa, synthetic construct
  REGION 1..10: note = Synthetic
GWIRGDRTSM

SEQ ID NO: 998 - protein, 10 aa, synthetic construct
  REGION 1..10: note = Synthetic
TFSRGDHTVL

SEQ ID NO: 999 - protein, 10 aa, synthetic construct
  REGION 1..10: note = Synthetic
SGARGDLVGV

SEQ ID NO: 1000 - protein, 10 aa, synthetic construct
  REGION 1..10: note = Synthetic
NNVRGDYTSV

SEQ ID NO: 1001 - protein, 10 aa, synthetic construct
  REGION 1..10: note = Synthetic
QTARGDHVVL

SEQ ID NO: 1002 - protein, 10 aa, synthetic construct
  REGION 1..10: note = Synthetic
TLIRGDLTRS

SEQ ID NO: 1003 - protein, 10 aa, synthetic construct
  REGION 1..10: note = Synthetic
VTTRGDRLEL

SEQ ID NO: 1004 - protein, 10 aa, synthetic construct
  REGION 1..10: note = Synthetic
EASRGDLQMR

SEQ ID NO: 1005 - protein, 10 aa, synthetic construct
  REGION 1..10: note = Synthetic
TYARGDLSGH

SEQ ID NO: 1006 - protein, 10 aa, synthetic construct
  REGION 1..10: note = Synthetic
DSSRGDRSSV

SEQ ID NO: 1007 - protein, 10 aa, synthetic construct
  REGION 1..10: note = Synthetic
SQSRGDLVPL

SEQ ID NO: 1008 - protein, 10 aa, synthetic construct
  REGION 1..10: note = Synthetic
MPARGDLVQT

SEQ ID NO: 1009 - protein, 10 aa, synthetic construct
  REGION 1..10: note = Synthetic
SGVRGDRLAV

SEQ ID NO: 1010 - protein, 10 aa, synthetic construct
  REGION 1..10: note = Synthetic
SNERGDQHRL

SEQ ID NO: 1011 - protein, 10 aa, synthetic construct
  REGION 1..10: note = Synthetic
STLRGDYAVS

SEQ ID NO: 1012 - protein, 10 aa, synthetic construct
  REGION 1..10: note = Synthetic
SNARGDIMTT

SEQ ID NO: 1013 - protein, 10 aa, synthetic construct
  REGION 1..10: note = Synthetic
TTGRGDQARL

SEQ ID NO: 1014 - protein, 10 aa, synthetic construct
  REGION 1..10: note = Synthetic
TTLRGDHSQL

SEQ ID NO: 1015 - protein, 10 aa, synthetic construct
  REGION 1..10: note = Synthetic
TNLRGDYQLT

SEQ ID NO: 1016 - protein, 10 aa, synthetic construct
  REGION 1..10: note = Synthetic
STSRGDYVTH

SEQ ID NO: 1017 - protein, 10 aa, synthetic construct
  REGION 1..10: note = Synthetic
SATRGDYSIL

SEQ ID NO: 1018 - protein, 10 aa, synthetic construct
  REGION 1..10: note = Synthetic
QATRGDLQHT

SEQ ID NO: 1019 - protein, 10 aa, synthetic construct
  REGION 1..10: note = Synthetic
HDDRGDRRML

SEQ ID NO: 1020 - protein, 10 aa, synthetic construct
  REGION 1..10: note = Synthetic
SSHRGDLLAT

SEQ ID NO: 1021 - protein, 10 aa, synthetic construct
  REGION 1..10: note = Synthetic
SYQRGDQHNM

SEQ ID NO: 1022 - protein, 10 aa, synthetic construct
  REGION 1..10: note = Synthetic
SHQRGDYNTL

SEQ ID NO: 1023 - protein, 10 aa, synthetic construct
  REGION 1..10: note = Synthetic
MDQRGDMSVV

SEQ ID NO: 1024 - protein, 10 aa, synthetic construct
  REGION 1..10: note = Synthetic
QIARGDLHVP

SEQ ID NO: 1025 - protein, 10 aa, synthetic construct
  REGION 1..10: note = Synthetic
TYTRGDQHMM

SEQ ID NO: 1026 - protein, 10 aa, synthetic construct
  REGION 1..10: note = Synthetic
DASRGDRTSL

SEQ ID NO: 1027 - protein, 10 aa, synthetic construct
  REGION 1..10: note = Synthetic
SDRRGDLHPQ

SEQ ID NO: 1028 - protein, 10 aa, synthetic construct
  REGION 1..10: note = Synthetic
SATRGDHSTL

SEQ ID NO: 1029 - protein, 10 aa, synthetic construct
  REGION 1..10: note = Synthetic
AYQRGDFTSV

SEQ ID NO: 1030 - protein, 10 aa, synthetic construct
  REGION 1..10: note = Synthetic
TGNRGDLQSV

SEQ ID NO: 1031 - protein, 10 aa, synthetic construct
  REGION 1..10: note = Synthetic
AWRRGDLENA

SEQ ID NO: 1032 - protein, 10 aa, synthetic construct
  REGION 1..10: note = Synthetic
NAARGDHGLL

SEQ ID NO: 1033 - protein, 10 aa, synthetic construct
  REGION 1..10: note = Synthetic
SYSRGDHQAL

SEQ ID NO: 1034 - protein, 10 aa, synthetic construct
  REGION 1..10: note = Synthetic
DGVRGDRTVV

SEQ ID NO: 1035 - protein, 10 aa, synthetic construct
  REGION 1..10: note = Synthetic
SSERGDKMST

SEQ ID NO: 1036 - protein, 10 aa, synthetic construct
  REGION 1..10: note = Synthetic
TSMRGDYTHV

SEQ ID NO: 1037 - protein, 10 aa, synthetic construct
  REGION 1..10: note = Synthetic
SGVRGDRIII

SEQ ID NO: 1038 - protein, 10 aa, synthetic construct
  REGION 1..10: note = Synthetic
ENRRGDAQLL

SEQ ID NO: 1039 - protein, 10 aa, synthetic construct
  REGION 1..10: note = Synthetic
TVYRGDREQH

SEQ ID NO: 1040 - protein, 10 aa, synthetic construct
  REGION 1..10: note = Synthetic
LDRRGDLLNS

SEQ ID NO: 1041 - protein, 10 aa, synthetic construct
  REGION 1..10: note = Synthetic
ESVRGDLRST

SEQ ID NO: 1042 - protein, 10 aa, synthetic construct
  REGION 1..10: note = Synthetic
DKYRGDQRGL

SEQ ID NO: 1043 - protein, 10 aa, synthetic construct
  REGION 1..10: note = Synthetic
TDRRGDAHIL

SEQ ID NO: 1044 - protein, 10 aa, synthetic construct
  REGION 1..10: note = Synthetic
SQTRGDTSLM

SEQ ID NO: 1045 - protein, 10 aa, synthetic construct
  REGION 1..10: note = Synthetic
DATRGDTRML

SEQ ID NO: 1046 - protein, 10 aa, synthetic construct
  REGION 1..10: note = Synthetic
SMQRGDLTHA

SEQ ID NO: 1047 - protein, 10 aa, synthetic construct
  REGION 1..10: note = Synthetic
SGTRGDTLIL

SEQ ID NO: 1048 - protein, 10 aa, synthetic construct
  REGION 1..10: note = Synthetic
ANTRGDHQNF

SEQ ID NO: 1049 - protein, 10 aa, synthetic construct
  REGION 1..10: note = Synthetic
TSQRGDHTQL

SEQ ID NO: 1050 - protein, 10 aa, synthetic construct
  REGION 1..10: note = Synthetic
SHWRGDTSSL

SEQ ID NO: 1051 - protein, 10 aa, synthetic construct
  REGION 1..10: note = Synthetic
ISGRGDRQEL

SEQ ID NO: 1052 - protein, 10 aa, synthetic construct
  REGION 1..10: note = Synthetic
SVLRGDIGTI

SEQ ID NO: 1053 - protein, 10 aa, synthetic construct
  REGION 1..10: note = Synthetic
QDSRGDLSGK

SEQ ID NO: 1054 - protein, 10 aa, synthetic construct
  REGION 1..10: note = Synthetic
KPIRGDGAEL

SEQ ID NO: 1055 - protein, 10 aa, synthetic construct
  REGION 1..10: note = Synthetic
TYMRGDLQHT

SEQ ID NO: 1056 - protein, 10 aa, synthetic construct
  REGION 1..10: note = Synthetic
TELRGDLSST

SEQ ID NO: 1057 - protein, 10 aa, synthetic construct
  REGION 1..10: note = Synthetic
SAMRGDHAVL

SEQ ID NO: 1058 - protein, 10 aa, synthetic construct
  REGION 1..10: note = Synthetic
SWVRGDASTL

SEQ ID NO: 1059 - protein, 10 aa, synthetic construct
  REGION 1..10: note = Synthetic
QYARGDPHAL

SEQ ID NO: 1060 - protein, 10 aa, synthetic construct
  REGION 1..10: note = Synthetic
STNRGDIVVH

SEQ ID NO: 1061 - protein, 10 aa, synthetic construct
  REGION 1..10: note = Synthetic
VNIRGDLHQT

SEQ ID NO: 1062 - protein, 10 aa, synthetic construct
  REGION 1..10: note = Synthetic
REYRGDSSIL

SEQ ID NO: 1063 - protein, 10 aa, synthetic construct
  REGION 1..10: note = Synthetic
STLRGDGSMM

SEQ ID NO: 1064 - protein, 10 aa, synthetic construct
  REGION 1..10: note = Synthetic
SSQRGDITAH

SEQ ID NO: 1065 - protein, 10 aa, synthetic construct
  REGION 1..10: note = Synthetic
TEFRGDRSTV

SEQ ID NO: 1066 - protein, 10 aa, synthetic construct
  REGION 1..10: note = Synthetic
TSTRGDYVTV

SEQ ID NO: 1067 - protein, 10 aa, synthetic construct
  REGION 1..10: note = Synthetic
NHLRGDVSAI

SEQ ID NO: 1068 - protein, 10 aa, synthetic construct
  REGION 1..10: note = Synthetic
LERRGDLVST

SEQ ID NO: 1069 - protein, 10 aa, synthetic construct
  REGION 1..10: note = Synthetic
NEYRGDHSHP

SEQ ID NO: 1070 - protein, 10 aa, synthetic construct
  REGION 1..10: note = Synthetic
NWQRGDTSTL

SEQ ID NO: 1071 - protein, 10 aa, synthetic construct
  REGION 1..10: note = Synthetic
TDSRGDRTVL

SEQ ID NO: 1072 - protein, 10 aa, synthetic construct
  REGION 1..10: note = Synthetic
YAVRGDQHTI

SEQ ID NO: 1073 - protein, 10 aa, synthetic construct
  REGION 1..10: note = Synthetic
FGVRGDTRDL

SEQ ID NO: 1074 - protein, 10 aa, synthetic construct
  REGION 1..10: note = Synthetic
SSARGDTGML

SEQ ID NO: 1075 - protein, 10 aa, synthetic construct
  REGION 1..10: note = Synthetic
SAMRGDQMGQ

SEQ ID NO: 1076 - protein, 10 aa, synthetic construct
  REGION 1..10: note = Synthetic
SHTRGDLVTT

SEQ ID NO: 1077 - protein, 10 aa, synthetic construct
  REGION 1..10: note = Synthetic
VTTRGDTAIL

SEQ ID NO: 1078 - protein, 10 aa, synthetic construct
  REGION 1..10: note = Synthetic
EPTRGDRHSI

SEQ ID NO: 1079 - protein, 10 aa, synthetic construct
  REGION 1..10: note = Synthetic
GSQRGDRLVL

SEQ ID NO: 1080 - protein, 10 aa, synthetic construct
  REGION 1..10: note = Synthetic
QHYRGDLSTT

SEQ ID NO: 1081 - protein, 10 aa, synthetic construct
  REGION 1..10: note = Synthetic
METRGDRQQL

SEQ ID NO: 1082 - protein, 10 aa, synthetic construct
  REGION 1..10: note = Synthetic
EALRGDKVVL

SEQ ID NO: 1083 - protein, 10 aa, synthetic construct
  REGION 1..10: note = Synthetic
NAVRGDQSYV

SEQ ID NO: 1084 - protein, 10 aa, synthetic construct
  REGION 1..10: note = Synthetic
SPLRGDNRAL

SEQ ID NO: 1085 - protein, 10 aa, synthetic construct
  REGION 1..10: note = Synthetic
ENRRGDTHAL

SEQ ID NO: 1086 - protein, 10 aa, synthetic construct
  REGION 1..10: note = Synthetic
NSQRGDLTGT

SEQ ID NO: 1087 - protein, 10 aa, synthetic construct
  REGION 1..10: note = Synthetic
DNSRGDHSRL

SEQ ID NO: 1088 - protein, 10 aa, synthetic construct
  REGION 1..10: note = Synthetic
NTHRGDYASI

SEQ ID NO: 1089 - protein, 10 aa, synthetic construct
  REGION 1..10: note = Synthetic
HTTRGDQQPL

SEQ ID NO: 1090 - protein, 10 aa, synthetic construct
  REGION 1..10: note = Synthetic
EWRRGDQTAL

SEQ ID NO: 1091 - protein, 10 aa, synthetic construct
  REGION 1..10: note = Synthetic
TAVRGDQTTV

SEQ ID NO: 1092 - protein, 10 aa, synthetic construct
  REGION 1..10: note = Synthetic
EYLRGDRISQ

SEQ ID NO: 1093 - protein, 10 aa, synthetic construct
  REGION 1..10: note = Synthetic
SRYRGDQETI

SEQ ID NO: 1094 - protein, 10 aa, synthetic construct
  REGION 1..10: note = Synthetic
ASLRGDTVTL

SEQ ID NO: 1095 - protein, 10 aa, synthetic construct
  REGION 1..10: note = Synthetic
VGVRGDSHVL

SEQ ID NO: 1096 - protein, 10 aa, synthetic construct
  REGION 1..10: note = Synthetic
TNSRGDHTSL

SEQ ID NO: 1097 - protein, 10 aa, synthetic construct
  REGION 1..10: note = Synthetic
VDQRGDQRAL

SEQ ID NO: 1098 - protein, 10 aa, synthetic construct
  REGION 1..10: note = Synthetic
ASVRGDRLDV

SEQ ID NO: 1099 - protein, 10 aa, synthetic construct
  REGION 1..10: note = Synthetic
TSYRGDLSSN

SEQ ID NO: 1100 - protein, 10 aa, synthetic construct
  REGION 1..10: note = Synthetic
TSDRGDSSNR

SEQ ID NO: 1101 - protein, 10 aa, synthetic construct
  REGION 1..10: note = Synthetic
SYMRGDLDMR

SEQ ID NO: 1102 - protein, 10 aa, synthetic construct
  REGION 1..10: note = Synthetic
TDVRGDRSMI

SEQ ID NO: 1103 - protein, 10 aa, synthetic construct
  REGION 1..10: note = Synthetic
SYVRGDSSTV

SEQ ID NO: 1104 - protein, 10 aa, synthetic construct
  REGION 1..10: note = Synthetic
QVYRGDRESV

SEQ ID NO: 1105 - protein, 10 aa, synthetic construct
  REGION 1..10: note = Synthetic
TDRRGDAVSF

SEQ ID NO: 1106 - protein, 10 aa, synthetic construct
  REGION 1..10: note = Synthetic
TNSRGDLHTT

SEQ ID NO: 1107 - protein, 10 aa, synthetic construct
  REGION 1..10: note = Synthetic
EAIRGDFKTL

SEQ ID NO: 1108 - protein, 10 aa, synthetic construct
  REGION 1..10: note = Synthetic
TGIRGDTAGL

SEQ ID NO: 1109 - protein, 10 aa, synthetic construct
  REGION 1..10: note = Synthetic
TSSRGDVQSL

SEQ ID NO: 1110 - protein, 10 aa, synthetic construct
  REGION 1..10: note = Synthetic
SSRRGDTNEL

SEQ ID NO: 1111 - protein, 10 aa, synthetic construct
  REGION 1..10: note = Synthetic
SNARGDHTPL

SEQ ID NO: 1112 - protein, 10 aa, synthetic construct
  REGION 1..10: note = Synthetic
SELRGDRSPY

SEQ ID NO: 1113 - protein, 10 aa, synthetic construct
  REGION 1..10: note = Synthetic
VHARGDTSIM

SEQ ID NO: 1114 - protein, 10 aa, synthetic construct
  REGION 1..10: note = Synthetic
SALRGDHGTL

SEQ ID NO: 1115 - protein, 10 aa, synthetic construct
  REGION 1..10: note = Synthetic
QTGRGDIAGM

SEQ ID NO: 1116 - protein, 10 aa, synthetic construct
  REGION 1..10: note = Synthetic
TVARGDQIRL

SEQ ID NO: 1117 - protein, 10 aa, synthetic construct
  REGION 1..10: note = Synthetic
TNSRGDSVAL

SEQ ID NO: 1118 - protein, 10 aa, synthetic construct
  REGION 1..10: note = Synthetic
QNARGDSAVI

SEQ ID NO: 1119 - protein, 10 aa, synthetic construct
  REGION 1..10: note = Synthetic
HYLRGDTTTL

SEQ ID NO: 1120 - protein, 10 aa, synthetic construct
  REGION 1..10: note = Synthetic
ANARGDLQNT

SEQ ID NO: 1121 - protein, 10 aa, synthetic construct
  REGION 1..10: note = Synthetic
QNIRGDIRTV

SEQ ID NO: 1122 - protein, 10 aa, synthetic construct
  REGION 1..10: note = Synthetic
AALRGDHGQM

SEQ ID NO: 1123 - protein, 10 aa, synthetic construct
  REGION 1..10: note = Synthetic
TTDRGDLSAR

SEQ ID NO: 1124 - protein, 10 aa, synthetic construct
  REGION 1..10: note = Synthetic
LNVRGDLVHT

SEQ ID NO: 1125 - protein, 10 aa, synthetic construct
  REGION 1..10: note = Synthetic
YSTRGDHTVL

SEQ ID NO: 1126 - protein, 10 aa, synthetic construct
  REGION 1..10: note = Synthetic
TNARGDLTVS

SEQ ID NO: 1127 - protein, 10 aa, synthetic construct
  REGION 1..10: note = Synthetic
TNARGDYTAL

SEQ ID NO: 1128 - protein, 10 aa, synthetic construct
  REGION 1..10: note = Synthetic
AEGRGDTRGS

SEQ ID NO: 1129 - protein, 10 aa, synthetic construct
  REGION 1..10: note = Synthetic
TNIRGDQSSV

SEQ ID NO: 1130 - protein, 10 aa, synthetic construct
  REGION 1..10: note = Synthetic
VDRRGDTMTM

SEQ ID NO: 1131 - protein, 10 aa, synthetic construct
  REGION 1..10: note = Synthetic
QIGRGDVTPL

SEQ ID NO: 1132 - protein, 10 aa, synthetic construct
  REGION 1..10: note = Synthetic
MQARGDLLGV

SEQ ID NO: 1133 - protein, 10 aa, synthetic construct
  REGION 1..10: note = Synthetic
NTQRGDYASV

SEQ ID NO: 1134 - protein, 10 aa, synthetic construct
  REGION 1..10: note = Synthetic
SDTRGDRITQ

SEQ ID NO: 1135 - protein, 10 aa, synthetic construct
  REGION 1..10: note = Synthetic
SAIRGDYRDV

SEQ ID NO: 1136 - protein, 10 aa, synthetic construct
  REGION 1..10: note = Synthetic
VGVRGDVHPL

SEQ ID NO: 1137 - protein, 10 aa, synthetic construct
  REGION 1..10: note = Synthetic
TVLRGDAERL

SEQ ID NO: 1138 - protein, 10 aa, synthetic construct
  REGION 1..10: note = Synthetic
ASTRGDLSGQ

SEQ ID NO: 1139 - protein, 10 aa, synthetic construct
  REGION 1..10: note = Synthetic
DSRRGDGQNL

SEQ ID NO: 1140 - protein, 10 aa, synthetic construct
  REGION 1..10: note = Synthetic
IDKRGDIQGL

SEQ ID NO: 1141 - protein, 10 aa, synthetic construct
  REGION 1..10: note = Synthetic
TVTRGDLLVN

SEQ ID NO: 1142 - protein, 10 aa, synthetic construct
  REGION 1..10: note = Synthetic
DSTRGDRLGL

SEQ ID NO: 1143 - protein, 10 aa, synthetic construct
  REGION 1..10: note = Synthetic
AANRGDYASL

SEQ ID NO: 1144 - protein, 10 aa, synthetic construct
  REGION 1..10: note = Synthetic
RDYRGDTSSL

SEQ ID NO: 1145 - protein, 10 aa, synthetic construct
  REGION 1..10: note = Synthetic
SNIRGDASLH

SEQ ID NO: 1146 - protein, 10 aa, synthetic construct
  REGION 1..10: note = Synthetic
NLQRGDRTDF

SEQ ID NO: 1147 - protein, 10 aa, synthetic construct
  REGION 1..10: note = Synthetic
NASRGDHSSM

SEQ ID NO: 1148 - protein, 10 aa, synthetic construct
  REGION 1..10: note = Synthetic
TSMRGDYTHV

SEQ ID NO: 1149 - protein, 10 aa, synthetic construct
  REGION 1..10: note = Synthetic
TSRRGDLNDV

SEQ ID NO: 1150 - protein, 10 aa, synthetic construct
  REGION 1..10: note = Synthetic
QSHRGDVQSL

SEQ ID NO: 1151 - protein, 10 aa, synthetic construct
  REGION 1..10: note = Synthetic
STTRGDYQSV

SEQ ID NO: 1152 - protein, 10 aa, synthetic construct
  REGION 1..10: note = Synthetic
YSTRGDHAML

SEQ ID NO: 1153 - protein, 10 aa, synthetic construct
  REGION 1..10: note = Synthetic
TSARGDLIHT

SEQ ID NO: 1154 - protein, 10 aa, synthetic construct
  REGION 1..10: note = Synthetic
ATARGDRESF

SEQ ID NO: 1155 - protein, 10 aa, synthetic construct
  REGION 1..10: note = Synthetic
ASTRGDYSTM

SEQ ID NO: 1156 - protein, 10 aa, synthetic construct
  REGION 1..10: note = Synthetic
SNNRGDVQRL

SEQ ID NO: 1157 - protein, 10 aa, synthetic construct
  REGION 1..10: note = Synthetic
ERLRGDQHII

SEQ ID NO: 1158 - protein, 10 aa, synthetic construct
  REGION 1..10: note = Synthetic
SSIRGDHATL

SEQ ID NO: 1159 - protein, 10 aa, synthetic construct
  REGION 1..10: note = Synthetic
NPTRGDIATV

SEQ ID NO: 1160 - protein, 10 aa, synthetic construct
  REGION 1..10: note = Synthetic
MSTRGDLSVN

SEQ ID NO: 1161 - protein, 10 aa, synthetic construct
  REGION 1..10: note = Synthetic
MDRRGDITYA

SEQ ID NO: 1162 - protein, 10 aa, synthetic construct
  REGION 1..10: note = Synthetic
NATRGDLMSA

SEQ ID NO: 1163 - protein, 10 aa, synthetic construct
  REGION 1..10: note = Synthetic
SDHRGDRTYQ

SEQ ID NO: 1164 - protein, 10 aa, synthetic construct
  REGION 1..10: note = Synthetic
NWVRGDLSTA

SEQ ID NO: 1165 - protein, 10 aa, synthetic construct
  REGION 1..10: note = Synthetic
SSHRGDLSAT

SEQ ID NO: 1166 - protein, 10 aa, synthetic construct
  REGION 1..10: note = Synthetic
NATRGDYREI

SEQ ID NO: 1167 - protein, 10 aa, synthetic construct
  REGION 1..10: note = Synthetic
DTLRGDLQTA

SEQ ID NO: 1168 - protein, 10 aa, synthetic construct
  REGION 1..10: note = Synthetic
IAVRGDLTPV

SEQ ID NO: 1169 - protein, 10 aa, synthetic construct
  REGION 1..10: note = Synthetic
TLLRGDLAHS

SEQ ID NO: 1170 - protein, 10 aa, synthetic construct
  REGION 1..10: note = Synthetic
MNTRGDHTVL

SEQ ID NO: 1171 - protein, 10 aa, synthetic construct
  REGION 1..10: note = Synthetic
TGHRGDIAVY

SEQ ID NO: 1172 - protein, 10 aa, synthetic construct
  REGION 1..10: note = Synthetic
TSNRGDQMSN

SEQ ID NO: 1173 - protein, 10 aa, synthetic construct
  REGION 1..10: note = Synthetic
SATRGDHTAI

SEQ ID NO: 1174 - protein, 10 aa, synthetic construct
  REGION 1..10: note = Synthetic
SSVRGDREHA

SEQ ID NO: 1175 - protein, 10 aa, synthetic construct
  REGION 1..10: note = Synthetic
TNSRGDLVVH

SEQ ID NO: 1176 - protein, 10 aa, synthetic construct
  REGION 1..10: note = Synthetic
ETRRGDLSSQ

SEQ ID NO: 1177 - protein, 10 aa, synthetic construct
  REGION 1..10: note = Synthetic
TYARGDITLT

SEQ ID NO: 1178 - protein, 10 aa, synthetic construct
  REGION 1..10: note = Synthetic
SASRGDTLHL

SEQ ID NO: 1179 - protein, 10 aa, synthetic construct
  REGION 1..10: note = Synthetic
DNQRGDLSSR

SEQ ID NO: 1180 - protein, 10 aa, synthetic construct
  REGION 1..10: note = Synthetic
TQSRGDLRDA

SEQ ID NO: 1181 - protein, 10 aa, synthetic construct
  REGION 1..10: note = Synthetic
ENRRGDLTNA

SEQ ID NO: 1182 - protein, 10 aa, synthetic construct
  REGION 1..10: note = Synthetic
TSIRGDISSV

SEQ ID NO: 1183 - protein, 10 aa, synthetic construct
  REGION 1..10: note = Synthetic
ISARGDTMTL

SEQ ID NO: 1184 - protein, 10 aa, synthetic construct
  REGION 1..10: note = Synthetic
SRVRGDQDHW

SEQ ID NO: 1185 - protein, 10 aa, synthetic construct
  REGION 1..10: note = Synthetic
SGNRGDIASY

SEQ ID NO: 1186 - protein, 10 aa, synthetic construct
  REGION 1..10: note = Synthetic
NEQRGDRYNH

SEQ ID NO: 1187 - protein, 10 aa, synthetic construct
  REGION 1..10: note = Synthetic
EALRGDVRAL

SEQ ID NO: 1188 - protein, 10 aa, synthetic construct
  REGION 1..10: note = Synthetic
VDRRGDYTQM

SEQ ID NO: 1189 - protein, 10 aa, synthetic construct
  REGION 1..10: note = Synthetic
NNVRGDYTSV

SEQ ID NO: 1190 - protein, 10 aa, synthetic construct
  REGION 1..10: note = Synthetic
QTYRGDASVL

SEQ ID NO: 1191 - protein, 10 aa, synthetic construct
  REGION 1..10: note = Synthetic
SNYRGDHGSL

SEQ ID NO: 1192 - protein, 10 aa, synthetic construct
  REGION 1..10: note = Synthetic
TSSRGDLREV

SEQ ID NO: 1193 - protein, 10 aa, synthetic construct
  REGION 1..10: note = Synthetic
QYTRGDVSNL

SEQ ID NO: 1194 - protein, 10 aa, synthetic construct
  REGION 1..10: note = Synthetic
SDLRGDVRER

SEQ ID NO: 1195 - protein, 10 aa, synthetic construct
  REGION 1..10: note = Synthetic
QNARGDTTAL

SEQ ID NO: 1196 - protein, 10 aa, synthetic construct
  REGION 1..10: note = Synthetic
NSLRGDRDTM

SEQ ID NO: 1197 - protein, 10 aa, synthetic construct
  REGION 1..10: note = Synthetic
SNSRGDQAQV

SEQ ID NO: 1198 - protein, 10 aa, synthetic construct
  REGION 1..10: note = Synthetic
EATRGDRSTL

SEQ ID NO: 1199 - protein, 10 aa, synthetic construct
  REGION 1..10: note = Synthetic
VPQRGDITNL

SEQ ID NO: 1200 - protein, 10 aa, synthetic construct
  REGION 1..10: note = Synthetic
DKIRGDLRSI

SEQ ID NO: 1201 - protein, 10 aa, synthetic construct
  REGION 1..10: note = Synthetic
SAARGDYSIV

SEQ ID NO: 1202 - protein, 10 aa, synthetic construct
  REGION 1..10: note = Synthetic
VGLRGDLIGQ

SEQ ID NO: 1203 - protein, 10 aa, synthetic construct
  REGION 1..10: note = Synthetic
QAGRGDLTVI

SEQ ID NO: 1204 - protein, 10 aa, synthetic construct
  REGION 1..10: note = Synthetic
SKTRGDFQEA

SEQ ID NO: 1205 - protein, 10 aa, synthetic construct
  REGION 1..10: note = Synthetic
GTARGDYSML

SEQ ID NO: 1206 - protein, 10 aa, synthetic construct
  REGION 1..10: note = Synthetic
ISTRGDLVTI

SEQ ID NO: 1207 - protein, 10 aa, synthetic construct
  REGION 1..10: note = Synthetic
TGTRGDREYM

SEQ ID NO: 1208 - protein, 10 aa, synthetic construct
  REGION 1..10: note = Synthetic
MTTRGDLSIT

SEQ ID NO: 1209 - protein, 10 aa, synthetic construct
  REGION 1..10: note = Synthetic
STSRGDMTSV

SEQ ID NO: 1210 - protein, 10 aa, synthetic construct
  REGION 1..10: note = Synthetic
GPARGDFTSS

SEQ ID NO: 1211 - protein, 10 aa, synthetic construct
  REGION 1..10: note = Synthetic
VDRRGDLGHV

SEQ ID NO: 1212 - protein, 10 aa, synthetic construct
  REGION 1..10: note = Synthetic
NSGRGDMSQL

SEQ ID NO: 1213 - protein, 10 aa, synthetic construct
  REGION 1..10: note = Synthetic
SQGRGDLERY

SEQ ID NO: 1214 - protein, 10 aa, synthetic construct
  REGION 1..10: note = Synthetic
VFGRGDQYTL

SEQ ID NO: 1215 - protein, 10 aa, synthetic construct
  REGION 1..10: note = Synthetic
IVGRGDLHLQ

SEQ ID NO: 1216 - protein, 10 aa, synthetic construct
  REGION 1..10: note = Synthetic
SYSRGDTSRL

SEQ ID NO: 1217 - protein, 10 aa, synthetic construct
  REGION 1..10: note = Synthetic
MSSRGDRATI

SEQ ID NO: 1218 - protein, 10 aa, synthetic construct
  REGION 1..10: note = Synthetic
MSSRGDLTRV

SEQ ID NO: 1219 - protein, 10 aa, synthetic construct
  REGION 1..10: note = Synthetic
QHTRGDFGNL

SEQ ID NO: 1220 - protein, 10 aa, synthetic construct
  REGION 1..10: note = Synthetic
ETRRGDLSSQ

SEQ ID NO: 1221 - protein, 10 aa, synthetic construct
  REGION 1..10: note = Synthetic
TGTRGDLRAI

SEQ ID NO: 1222 - protein, 10 aa, synthetic construct
  REGION 1..10: note = Synthetic
QMARGDLSTA

SEQ ID NO: 1223 - protein, 10 aa, synthetic construct
  REGION 1..10: note = Synthetic
LVERGDRIMN

SEQ ID NO: 1224 - protein, 10 aa, synthetic construct
  REGION 1..10: note = Synthetic
GLVRGDLNAR

SEQ ID NO: 1225 - protein, 10 aa, synthetic construct
  REGION 1..10: note = Synthetic
NNPRGDLSSV

SEQ ID NO: 1226 - protein, 10 aa, synthetic construct
  REGION 1..10: note = Synthetic
HEKRGDLSNS

SEQ ID NO: 1227 - protein, 10 aa, synthetic construct
  REGION 1..10: note = Synthetic
SQARGDLHQT

SEQ ID NO: 1228 - protein, 10 aa, synthetic construct
  REGION 1..10: note = Synthetic
FTGRGDLRTA

SEQ ID NO: 1229 - protein, 10 aa, synthetic construct
  REGION 1..10: note = Synthetic
QSIRGDTGHL

SEQ ID NO: 1230 - protein, 10 aa, synthetic construct
  REGION 1..10: note = Synthetic
SAGRGDMSVL

SEQ ID NO: 1231 - protein, 10 aa, synthetic construct
  REGION 1..10: note = Synthetic
SERRGDEHKW

SEQ ID NO: 1232 - protein, 10 aa, synthetic construct
  REGION 1..10: note = Synthetic
TTGRGDLVSL

SEQ ID NO: 1233 - protein, 10 aa, synthetic construct
  REGION 1..10: note = Synthetic
LGLRGDQIGQ

SEQ ID NO: 1234 - protein, 10 aa, synthetic construct
  REGION 1..10: note = Synthetic
VALRGDLTHQ

SEQ ID NO: 1235 - protein, 10 aa, synthetic construct
  REGION 1..10: note = Synthetic
MIGRGDQAPL

SEQ ID NO: 1236 - protein, 10 aa, synthetic construct
  REGION 1..10: note = Synthetic
FQARGDHSTL

SEQ ID NO: 1237 - protein, 10 aa, synthetic construct
  REGION 1..10: note = Synthetic
NSVRGDHSSL

SEQ ID NO: 1238 - protein, 10 aa, synthetic construct
  REGION 1..10: note = Synthetic
WPNRGDLQST

SEQ ID NO: 1239 - protein, 10 aa, synthetic construct
  REGION 1..10: note = Synthetic
SASRGDYQTL

SEQ ID NO: 1240 - protein, 10 aa, synthetic construct
  REGION 1..10: note = Synthetic
TMQRGDLHTI

SEQ ID NO: 1241 - protein, 10 aa, synthetic construct
  REGION 1..10: note = Synthetic
TALRGDLAGT

SEQ ID NO: 1242 - protein, 10 aa, synthetic construct
  REGION 1..10: note = Synthetic
VNARGDFSQT

SEQ ID NO: 1243 - protein, 10 aa, synthetic construct
  REGION 1..10: note = Synthetic
GWIRGDRTSM

SEQ ID NO: 1244 - protein, 10 aa, synthetic construct
  REGION 1..10: note = Synthetic
TFSRGDHTVL

SEQ ID NO: 1245 - protein, 10 aa, synthetic construct
  REGION 1..10: note = Synthetic
SGARGDLVGV

SEQ ID NO: 1246 - protein, 10 aa, synthetic construct
  REGION 1..10: note = Synthetic
NNVRGDYTSV

SEQ ID NO: 1247 - protein, 10 aa, synthetic construct
  REGION 1..10: note = Synthetic
QTARGDHVVL

SEQ ID NO: 1248 - protein, 10 aa, synthetic construct
  REGION 1..10: note = Synthetic
TLIRGDLTRS

SEQ ID NO: 1249 - protein, 10 aa, synthetic construct
  REGION 1..10: note = Synthetic
VTTRGDRLEL

SEQ ID NO: 1250 - protein, 738 aa, synthetic construct
  REGION 1..738: note = Synthetic
MAADGYLPDWLEDNLSEGIREWWDLKPGAPKPKANQQKQDDGRGLVLPGYKYLGPFNGLDKGEPVNAADAAALEHDKAYDQQLKAGDNPYLRYNHADAEFQERLQEDTSFGGNLGRAVFQAKKRVLEPLGLVEEGAKTAPGKKRPVEPSPQRSPDSSTGIGKTGQQPAKKRLNFGQTGDSESVPDPQPIGEPPAGPSGLGSGTMAAGGGAPMADNNEGADGVGSSSGNWHCDSAWLGDRVITTSTRPWALPTYNNHLYKQISNGTSGGSTNDNTYFGYSTPWGYFDFNRFHCHFSPRDWQRLINNNWGFRPKRLNFKLFNIQVKEVTQNEGTKTIANNLTSTIQVFTDSEYQLPYVLGSAHQGCPPPFPADVFMIPQYGYLTLNNGSQAVGRSSFYCLEYFPSQMRRTGNNFEFSYQFEDVPFHSSYAHSQSLDRLMNPLIDQYLYYLSRTQSTGGTAGTQQLLFSQAGPNNMSAQAKNWLPGPCYRQQRVSTTLSQNNNSNFAWTGATKYHLNGRDSLVNPGVAMATHKDDEERFFPSSGVLMFGKQGAGKDNVDYSSVMLTSEEEIKTTNPVATEQYGVVADNLQQQNAAPIVGAVNSQGALPGMVWQNRDVYLQGPIWAKIPHTDGNFHPSPLMGGFGLKHPPPQILIKNTPVPADPPTTFSQAKLASFITQYSTGQVSVEIEWELQKENSKRWNPEIQYTSNYYKSTNVDFAVNTEGTYSEPRPIGTRYLTRNL

SEQ ID NO: 1251 - protein, 738 aa, synthetic construct; identical to SEQ ID NO: 1250
  REGION 1..738: note = Synthetic

SEQ ID NO: 1252 - protein, 738 aa, synthetic construct
  REGION 1..738: note = Synthetic
MAADGYLPDWLEDNLSEGIREWWDLKPGAPKPKANQQKQDDGRGLVLPGYKYLGPFNGLDKGEPVNAADAAALEHDKAYDQQLKAGDNPYLRYNHADAEFQERLQEDTSFGGNLGRAVFQAKKRVLEPLGLVEEAAKTAPGKKRPVEPSPQRSPDSSTGIGKKGQQPAKKRLNFGQTGDSESVPDPQPIGEPPAGPSGLGSGTMAAGGGAPMADNNEGADGVGSSSGNWHCDSTWLGDRVITTSTRTWALPTYNNHLYKQISNGTSGGSTNDNTYFGYSTPWGYFDFNRFHCHFSPRDWQRLINNNWGFRPKRLSFKLFNIQVKEVTQNEGTKTIANNLTSTIQVFTDSEYQLPYVLGSAHQGCLPPFPADVFMIPQYGYLTLNNGSQAVGRSSFYCLEYFPSQMLRTGNNFEFSYTFEDVPFHSSYAHSQSLDRLMNPLIDQYLYYLSRTQSTGGTQGTQQLLFSQAGPANMSAQAKNWLPGPCYRQQRVSTTLSQSNNSNFAWTGATKYHLNGRDSLVNPGVAMATHKDDEERFFPSSGVLMFGKQGAGRDNVDYSSVMLTSEEEIKTTNPVATEQYGVVADNLQQTNTGPIVGNVNSQGALPGMVWQNRDVYLQGPIWAKIPHTDGNFHPSPLMGGLGLKHPPPQILIKNTPVPADPPTTFSQAKLASFITQYSTGQVSVEIEWELQKENSKRWNPEIQYTSNYYKSTNVDFAVNTEGTYSEPRPIGTRYLTRNL

SEQ ID NO: 1253 - protein, 738 aa, synthetic construct
  REGION 1..738: note = Synthetic
MAADGYLPDWLEDNLSEGIREWWDLKPGAPKPKANQQKQDDGRGLVLPGYKYLGPFNGLDKGEPVNAADAAALEHDKAYDQQLKAGDNPYLRYNHADAEFQERLQEDTSFGGNLGRAVFQAKKRVLEPLGLVEEAAKTAPGKKRPVEPSPQRSPDSSTGIGKKGQRPAKKRLNFGQTGDSESVPDPQPIGEPPAGPSGLGSGTMAAGGGAPMADNNEGADGVGSSSGNWHCDSTWLGDRVITTSTRTWALPTYNNHLYKQISNGTSGGSTNDNTYFGYSTPWGYFDFNRFHCHFSPRDWQRLINNNWGFRPKRLSFKPFNIQVKEVTQNEGTKTIANNLTSTIQVFTDSEYQLPYVLGSAHQGCLPPFPADVFMIPQYGYLTLNNGSQAVGRSSFYCLEYFPSQMLRTGNNFEFSYTFEDVPFHSSYAHSQSLDRLMNPLIDQYLHYLSRTQSTGGTQGTQQLLFSQAGPANMSAQAKNWLPGPCYRQQRVSTTLSQNNNSNFAWTGATKYHLNGRDSLVNPGVAMATHKDDEERFFPSSGVLMFGKQGAGRDNVDYSSVMLTSEEEIKTTNPVATEQYGVVADNLQQTNTGPIVGNVNSQGALPGMVWQNRDVYLQGPIWAKIPHTDGNFHPSPLMGGFGLKHPPPQILIKNTPVPADPPTTFSQAKLASFITQYSTGQVSVEIEWELQKENSKRWNPEIQYTSNYYKSTNVDFAVNTEGTYSEPRPIGTRYLTRNL

SEQ ID NO: 1254 - protein, 738 aa, synthetic construct
  REGION 1..738: note = Synthetic
MAADGYLPDWLEDNLSEGIREWWDLKPGAPKPKANQQKQDDGRGLVLPGYKYLGPFNGLDKGEPVNAADAAALEHDKAYDQQLKAGDNPYLRYNHADAEFQERLQEDTSFGGNLGRAVFQAKKRVLEPLGLVEEAAKTAPGKKRPVEPSPQRSPDSSTGIGKKGQQPAKKRLSFGQTGDSESVPDPQPIGEPPAGPSGLGSGTMAAGGGAPMADNNEGADGVGSSSGNWHCDSTWLGDRVITTSTRTWALPTYNNHLYKQISNGTSGGSTNDNTYFGYSTPWGYFDFNRFHCHFSPRDWQRLINNNWGFRPKRLSFKLFNIQVKEVTQNEGTKTIANNLTSTIQVFTDSEYQLPYVLGSAHQGCLPPFPADVFMIPQYGYLTLNNGSQAVGRSSFYCLEYFPSQMLRTGNNSEFSYTFEDVPFHSSYAHSQSLDRLMNPLIDQYLYYLSRTQSTGGTQGTQQLLFSQAGPANMSAQAKNWLPGPCYRQQRVSTTLSQNNNSNFAWTGATKYHLNGRDSLVNPGVAMATHKDDEERFFPSSGVLMFGKQGAGRDNVDYSSVMLTSEEEIKTTNPVATEQYGVVADNLQQTNTGPIVGNVNSQGALPGMVWQNRDVYLQGPIWAKIPHTDGNFHPSPLMGGFGLKHPPPQILIKNTPVPADPPTTFSQAKLASFITQYSTGQVSVEIEWELQKENSKRWNPEIQYTSNYYKSTNVDFAVNTEGTYSEPRPIGTRYLTRNL

SEQ ID NO: 1255 - protein, 738 aa, synthetic construct
  REGION 1..738: note = Synthetic
MAADGYLPDWLEDNLSEGIREWWDLKPGAPKPKANQQKQDDGRGLVLPGYKYLGPFNGLDKGEPVNAADAAALEHDKAYDQQLKAGDNPYLRYNHADAEFQERLQEDTSFGGNLGRAVFQAKKRVLEPLGLVEEAAKTAPGKKRPVEPSPQRSPDSSTGIGKKGQQPAKKRLNFGQTGDSESVPDPQPIGEPPAGPSGLGSGTMAAGGGAPMADNNEGADGVGSSSGNWHCDSTWLGDRVITTSTRTWALPTYNNHLYKQISNGTSGGSTNDNTYFGYSTPWGYFDFNRFHCHFSPRDWQRLINNNWGFRPKRLSFKLFNIQVKEVTQNEGTKTIANNLTSTIQVFTDSEYQLPYVLGSAHQGCLPPFPADVFMIPQYGYLTLNNGSQAVGRSSFYCLEYFPSQMLRTGNNFEFSYTFEDVPFHSSYAHSQSLDRLMNPLIDQYLYYLSRTQSTGGTQGTQQLLFSQAGPANMSAQAKNWLPGPCYRQQRVSTTLSQNNNSNFAWTGATKYHLNGRDSLVNPGVAMATHKDDEERFFPSSGVLMFGKQGAGRDNVDYSSVMLTSEEEIKTTNPVATEQYGVVADNLQQTNTGPIVGNVNSQGALPGMVWQNRDVYLQGPIWAKIPHTDGNFHPSPLMGGFGLKHPPPQILIKNTPVPADPPTTFSQAKLASFITQYSTGQVSVEIEWELQKENSKRWNPEIQYTSNYYKSTNVDFAVNTEGTYSEPRPIGTRYLTRNL

SEQ ID NO: 1256 - protein, 738 aa, synthetic construct; identical to SEQ ID NO: 1255
  REGION 1..738: note = Synthetic

SEQ ID NO: 1257 - protein, 738 aa, synthetic construct; identical to SEQ ID NO: 1255
  REGION 1..738: note = Synthetic

SEQ ID NO: 1258 - protein, 738 aa, synthetic construct
  REGION 1..738: note = Synthetic
MAADGYLPDWLEDNLSEGIREWWDLKPGAPKPKANQQKQDDGRGLVLPGYKYLGPFNGLDKGEPVNAADAAALEHDKAYDQQLKAGDNPYLRYNHADAEFQERLQEDTSFGGNLGRAVFQAKKRVLEPLGPVEEAAKTAPGKKRPVEPPPQRSPDSSTGIGKKGQQPAKKRLNFGQTGDSESVPDPQPIGEPPAGPSGLGSGTMAAGGGAPMADNNEGADGVGSSSGNWHCDSTWLGDRVITTSTRTWALPTYNNHLYKQISNGTSGGSTNDNTYFGYSTPWGYFDFNRFHCHFSPRDWQRLINNNWGFRPKRLSFKLFNIQVKEVTQNEGTKTVANNLTSTIQVFTDSEYQLPYVLGSAHQGCLPPFPADVFMIPQYGYLTLNNGSQAVGRSSFYCLEYFPSQMLRTGNNFEFSYTFEDVPFHSSYAHSQSLDRLMNPLIDQYLYYLSRTQSTGGTQGTQQLLFSQAGPANMSAQAKNWLPGPCYRQQRVSTTLSQNNNSNFAWTGATKYHLNGRDSLVNPGVAMATHKDDEERFFPSSGVLMFGKQGAGRDNVDYSSVMLTSEEEIKTTNPVATEQYGVVADNLQQTNTGPIVGNVNSQGALPGMVWQNRDVYLQGPIWAKIPHTDGNFHPSPLMGGFGLKHPPPQILIKNTPVPADPPTTFSQAKLASFITQYSTGQVSVEIEWELQKENSKRWNPEIQYTSNYYKSTNVDFAVNTEGTYSEPRPIGTRYLTRNL

SEQ ID NO: 1259 - protein, 738 aa, synthetic construct
  REGION 1..738: note = Synthetic
MAADGYLPDWLEDNLSEGIREWWDLKPGAPKPKANQQKQDDGRGLVLPGYKYLGPFNGLDKGEPVNAADAAALEHDKAYDQQLKAGDNPYLRYNHADAEFQERLQEDTSFGGNLGRAVFQAKKRVLEPLGLVEEAAKTAPGKKRPVEPSPQRSPDSSTGIGKKGQQPAKKRLNFGQTGDSESVPDPQPIGEPPAGPSGLGSGTMAAGGGAPMADNNEGADGVGSSSGNWHCDSTWLGDRVITTSTRTWALPTYNNHLYKQISNGTSGGSTNDNTYFGYSTPWGYFDFNRFHCHFSPRDWQRLINNNWGFRPKRLSFKLFNIQVKEVTQDEGTKTIANNLTSTIQVFTDSEYQLPYVLGSAHQGCLPPFPADVFMIPQYGYLTLNNGSQAVGRSSFYCLEYFPSQMLRTGNNFEFSYTFEDVPFHSSYAHSQSLDRLMNPLIDQYLYYLSRTQSTGGTQGTQQLLFSQAGPANMSARAKNWLPGPCYRQQRVSTTLSQNNNSNFAWTGATKYHLNGRDSLVNPGVAMATHKDDEERFFPSSGVLMFGKQGAGRDNVDYSSVMLTSEEEIKTTNPVATEQYGVVADNLQQANTGPIVGNVNSQGALPGMVWQNRDVYLQGPIWAKIPHTDGNFHPSPLMGGFGLKHPPPQILIKNTPVPADPPTTFSQAKLASFITQYSTGQVSVEIEWELQKENSKRWNPEIQYTSNYYKSTNVDFAVNSEGTYSEPRPIGTRYLTRNL

SEQ ID NO: 1260 - protein, 743 aa, synthetic construct
  REGION 1..743: note = Synthetic
MAADGYLPDWLEDNLSEGIREWWALKPGAPQPKANQQHQDNARGLVLPGYKYLGPGNGLDKGEPVNAADAAALEHDKAYDQQLKAGDNPYLKYNHADAEFQERLKEDTSFGGNLGRAVFQAKKRLLEPLGLVEEAAKTAPGKKRPVEQSPQEPDSSAGIGKSGAQPAKKRLNFGQTGDTESVPDPQPIGEPPAAPSGVGSLTMASGGGAPVADNNEGADGVGSSSGNWHCDSQWLGDRVITTSTRTWALPTYNNHLYKQISNSTSGGSSNDNAYFGYSTPWGYFDFNRFHCHFSPRDWQRLINNNWGFRPKRLNFKLFNIQVKEVTDNNGVKTIANNLTSTVQVFTDSDYQLPYVLGSAHEGCLPPFPADVFMIPQYGYLTLNDGSQAVGRSSFYCLEYFPSQMLRTGNNFQFSYEFENVPFHSSYAHSQSLDRLMNPLIDQYLYYLSKTINGSGQNQQTLKFSVAGPSNMAVQGRNYIPGPSYRQQRVSTTVTQNNNSEFAWPGASSWALNGRNSLMNPGPAMASHKEGEDRFFPLSGSLIFGKQGTGRDNVDADKVMITNEEEIKTTNPVATESYGQVATNHQSNSRGDYNSLAQAQTGWVQNQGILPGMVWQDRDVYLQGPIWAKIPHTDGNFHPSPLMGGFGMKHPPPQILIKNTPVPADPPTAFNKDKLNSFITQYSTGQVSVEIEWELQKENSKRWNPEIQYTSNYYKSNNVEFAVNTEGVYSEPRPIGTRYLTRNL

SEQ ID NO: 1261 - protein, 745 aa, synthetic construct
  REGION 1..745: note = Synthetic
MAADGYLPDWLEDNLSEGIREWWALKPGAPQPKANQQHQDNARGLVLPGYKYLGPGNGLDKGEPVNAADAAALEHDKAYDQQLKAGDNPYLKYNHADAEFQERLKEDTSFGGNLGRAVFQAKKRLLEPLGLVEEAAKTAPGKKRPVEQSPQEPDSSAGIGKSGAQPAKKRLNFGQTGDTESVPDPQPIGEPPAAPSGVGSLTMASGGGAPVADNNEGADGVGSSSGNWHCDSQWLGDRVITTSTRTWALPTYNNHLYKQISNSTSGGSSNDNAYFGYSTPWGYFDFNRFHCHFSPRDWQRLINNNWGFRPKRLNFKLFNIQVKEVTDNNGVKTIANNLTSTVQVFTDSDYQLPYVLGSAHEGCLPPFPADVFMIPQYGYLTLNDGSQAVGRSSFYCLEYFPSQMLRTGNNFQFSYEFENVPFHSSYAHSQSLDRLMNPLIDQYLYYLSKTINGSGQNQQTLKFSVAGPSNMAVQGRNYIPGPSYRQQRVSTTVTQNNNSEFAWAAASSWALNGRNSLMNPGPAMASHKEGEDRFFPLSGSLIFGKQGTGRDNVDADKVMITNEEEIKTTNPVATESYGQVATNHQGQSGRGDLGLSAQAAQTGWVQNQGILPGMVWQDRDVYLQGPIWAKIPHTDGNFHPSPLMGGFGMKHPPPQILIKNTPVPADPPTAFNKDKLNSFITQYSTGQVSVEIEWELQKENSKRWNPEIQYTSNYYKSNNVEFAVNTEGVYSEPRPIGTRYLTRNL

SEQ ID NO: 1262 - protein, 745 aa, synthetic construct
  REGION 1..745: note = Synthetic
MAADGYLPDWLEDNLSEGIREWWALKPGAPQPKANQQHQDNARGLVLPGYKYLGPGNGLDKGEPVNAADAAALEHDKAYDQQLKAGDNPYLKYNHADAEFQERLKEDTSFGGNLGRAVFQAKKRLLEPLGLVEEAAKTAPGKKRPVEQSPQEPDSSAGIGKSGAQPAKKRLNFGQTGDTESVPDPQPIGEPPAAPSGVGSLTMASGGGAPVADNNEGADGVGSSSGNWHCDSQWLGDRVITTSTRTWALPTYNNHLYKQISNSTSGGSSNDNAYFGYSTPWGYFDFNRFHCHFSPRDWQRLINNNWGFRPKRLNFKLFNIQVKEVTDNNGVKTIANNLTSTVQVFTDSDYQLPYVLGSAHEGCLPPFPADVFMIPQYGYLTLNDGSQAVGRSSFYCLEYFPSQMLRTGNNFQFSYEFENVPFHSSYAHSQSLDRLMNPLIDQYLYYLSKTINGSGQNQQTLKFSVAGPSNMAVQGRNYIPGPSYRQQRVSTTVTQNNNSEFAWPGASSWALNGRNSLMNPGPAMASHKEGEDRFFPLSGSLIFGKQGTGRDNVDADKVMITNEEEIKTTNPVATESYGQVATNHQSGQSGRGDLGLSAQAATGWVQNQGILPGMVWQDRDVYLQGPIWAKIPHTDGNFHPSPLMGGFGMKHPPPQILIKNTPVPADPPTAFNKDKLNSFITQYSTGQVSVEIEWELQKENSKRWNPEIQYTSNYYKSNNVEFAVNTEGVYSEPRPIGTRYLTRNL

SEQ ID NO: 1263 - protein, 745 aa, synthetic construct
  REGION 1..745: note = Synthetic
MAADGYLPDWLEDNLSEGIREWWALKPGAPQPKANQQHQDNARGLVLPGYKYLGPGNGLDKGEPVNAADAAALEHDKAYDQQLKAGDNPYLKYNHADAEFQERLKEDTSFGGNLGRAVFQAKKRLLEPLGLVEEAAKTAPGKKRPVEQSPQEPDSSAGIGKSGAQPAKKRLNFGQTGDTESVPDPQPIGEPPAAPSGVGSLTMASGGGAPVADNNEGADGVGSSSGNWHCDSQWLGDRVITTSTRTWALPTYNNHLYKQISNSTSGGSSNDNAYFGYSTPWGYFDFNRFHCHFSPRDWQRLINNNWGFRPKRLNFKLFNIQVKEVTDNNGVKTIANNLTSTVQVFTDSDYQLPYVLGSAHEGCLPPFPADVFMIPQYGYLTLNDGSQAVGRSSFYCLEYFPSQMLRTGNNFQFSYEFENVPFHSSYAHSQSLDRLMNPLIDQYLYYLSKTINGSGQNQQTLKFSVAGPSNMAVQGRNYIPGPSYRQQRVSTTVTQNNNSEFAWPGASSWALNGRNSLMNPGPAMASHKEGEDRFFPLSGSLIFGKQGTGRDNVDADKVMITNEEEIKTTNPVATESYGQVATNHQGQSGRGDAVGVAQAAQTGWVQNQGILPGMVWQDRDVYLQGPIWAKIPHTDGNFHPSPLMGGFGMKHPPPQILIKNTPVPADPPTAFNKDKLNSFITQYSTGQVSVEIEWELQKENSKRWNPEIQYTSNYYKSNNVEFAVNTEGVYSEPRPIGTRYLTRNL

SEQ ID NO: 1264 - protein, 745 aa, synthetic construct
  REGION 1..745: note = Synthetic
MAADGYLPDWLEDNLSEGIREWWALKPGAPQPKANQQHQDNARGLVLPGYKYLGPGNGLDKGEPVNAADAAALEHDKAYDQQLKAGDNPYLKYNHADAEFQERLKEDTSFGGNLGRAVFQAKKRLLEPLGLVEEAAKTAPGKKRPVEQSPQEPDSSAGIGKSGAQPAKKRLNFGQTGDTESVPDPQPIGEPPAAPSGVGSLTMASGGGAPVADNNEGADGVGSSSGNWHCDSQWLGDRVITTSTRTWALPTYNNHLYKQISNSTSGGSSNDNAYFGYSTPWGYFDFNRFHCHFSPRDWQRLINNNWGFRPKRLNFKLFNIQVKEVTDNNGVKTIANNLTSTVQVFTDSDYQLPYVLGSAHEGCLPPFPADVFMIPQYGYLTLNDGSQAVGRSSFYCLEYFPSQMLRTGNNFQFSYEFENVPFHSSYAHSQSLDRLMNPLIDQYLYYLSKTINGSGQNQQTLKFSVAGPSNMAVQGRNYIPGPSYRQQRVSTTVTQNNNSEFAWPGASSWALNGRNSLMNPGPAMASHKEGEDRFFPLSGSLIFGKQGTGRDNVDADKVMITNEEEIKTTNPVATESYGQVATNHQSGQSGRGDAVGVAQAATGWVQNQGILPGMVWQDRDVYLQGPIWAKIPHTDGNFHPSPLMGGFGMKHPPPQILIKNTPVPADPPTAFNKDKLNSFITQYSTGQVSVEIEWELQKENSKRWNPEIQYTSNYYKSNNVEFAVNTEGVYSEPRPIGTRYLTRNL

SEQ ID NO: 1265 - protein, 745 aa, synthetic construct
  REGION 1..745: note = Synthetic
MAADGYLPDWLEDNLSEGIREWWALKPGAPQPKANQQHQDNARGLVLPGYKYLGPGNGLDKGEPVNAADAAALEHDKAYDQQLKAGDNPYLKYNHADAEFQERLKEDTSFGGNLGRAVFQAKKRLLEPLGLVEEAAKTAPGKKRPVEQSPQEPDSSAGIGKSGAQPAKKRLNFGQTGDTESVPDPQPIGEPPAAPSGVGSLTMASGGGAPVADNNEGADGVGSSSGNWHCDSQWLGDRVITTSTRTWALPTYNNHLYKQISNSTSGGSSNDNAYFGYSTPWGYFDFNRFHCHFSPRDWQRLINNNWGFRPKRLNFKLFNIQVKEVTDNNGVKTIANNLTSTVQVFTDSDYQLPYVLGSAHEGCLPPFPADVFMIPQYGYLTLNDGSQAVGRSSFYCLEYFPSQMLRTGNNFQFSYEFENVPFHSSYAHSQSLDRLMNPLIDQYLYYLSKTINGSGQNQQTLKFSVAGPSNMAVQGRNYIPGPSYRQQRVSTTVTQNNNSEFAWAAASSWALNGRNSLMNPGPAMASHKEGEDRFFPLSGSLIFGKQGTGRDNVDADKVMITNEEEIKTTNPVATESYGQVATNHQSGQSGRGDLGLSAQAATGWVQNQGILPGMVWQDRDVYLQGPIWAKIPHTDGNFHPSPLMGGFGMKHPPPQILIKNTPVPADPPTAFNKDKLNSFITQYSTGQVSVEIEWELQKENSKRWNPEIQYTSNYYKSNNVEFAVNTEGVYSEPRPIGTRYLTRNL

SEQ ID NO: 1266 - protein, 745 aa, synthetic construct
  REGION 1..745: note = Synthetic
MAADGYLPDWLEDNLSEGIREWWALKPGAPQPKANQQHQDNARGLVLPGYKYLGPGNGLDKGEPVNAADAAALEHDKAYDQQLKAGDNPYLKYNHADAEFQERLKEDTSFGGNLGRAVFQAKKRLLEPLGLVEEAAKTAPGKKRPVEQSPQEPDSSAGIGKSGAQPAKKRLNFGQTGDTESVPDPQPIGEPPAAPSGVGSLTMASGGGAPVADNNEGADGVGSSSGNWHCDSQWLGDRVITTSTRTWALPTYNNHLYKQISNSTSGGSSNDNAYFGYSTPWGYFDFNRFHCHFSPRDWQRLINNNWGFRPKRLNFKLFNIQVKEVTDNNGVKTIANNLTSTVQVFTDSDYQLPYVLGSAHEGCLPPFPADVFMIPQYGYLTLNDGSQAVGRSSFYCLEYFPSQMLRTGNNFQFSYEFENVPFHSSYAHSQSLDRLMNPLIDQYLYYLSKTINGSGQNQQTLKFSVAGPSNMAVQGRNYIPGPSYRQQRVSTTVTQNNNSEFAWAAASSWALNGRNSLMNPGPAMASHKEGEDRFFPLSGSLIFGKQGTGRDNVDADKVMITNEEEIKTTNPVATESYGQVATNHQGQSGRGDAVGVAQAAQTGWVQNQGILPGMVWQDRDVYLQGPIWAKIPHTDGNFHPSPLMGGFGMKHPPPQILIKNTPVPADPPTAFNKDKLNSFITQYSTGQVSVEIEWELQKENSKRWNPEIQYTSNYYKSNNVEFAVNTEGVYSEPRPIGTRYLTRNL

SEQ ID NO: 1267 - protein, 745 aa, synthetic construct
  REGION 1..745: note = Synthetic
MAADGYLPDWLEDNLSEGIREWWALKPGAPQPKANQQHQDNARGLVLPGYKYLGPGNGLDKGEPVNAADAAALEHDKAYDQQLKAGDNPYLKYNHADAEFQERLKEDTSFGGNLGRAVFQAKKRLLEPLGLVEEAAKTAPGKKRPVEQSPQEPDSSAGIGKSGAQPAKKRLNFGQTGDTESVPDPQPIGEPPAAPSGVGSLTMASGGGAPVADNNEGADGVGSSSGNWHCDSQWLGDRVITTSTRTWALPTYNNHLYKQISNSTSGGSSNDNAYFGYSTPWGYFDFNRFHCHFSPRDWQRLINNNWGFRPKRLNFKLFNIQVKEVTDNNGVKTIANNLTSTVQVFTDSDYQLPYVLGSAHEGCLPPFPADVFMIPQYGYLTLNDGSQAVGRSSFYCLEYFPSQMLRTGNNFQFSYEFENVPFHSSYAHSQSLDRLMNPLIDQYLYYLSKTINGSGQNQQTLKFSVAGPSNMAVQGRNYIPGPSYRQQRVSTTVTQNNNSEFAWAAASSWALNGRNSLMNPGPAMASHKEGEDRFFPLSGSLIFGKQGTGRDNVDADKVMITNEEEIKTTNPVATESYGQVATNHQSGQSGRGDAVGVAQAATGWVQNQGILPGMVWQDRDVYLQGPIWAKIPHTDGNFHPSPLMGGFGMKHPPPQILIKNTPVPADPPTAFNKDKLNSFITQYSTGQVSVEIEWELQKENSKRWNPEIQYTSNYYKSNNVEFAVNTEGVYSEPRPIGTRYLTRNL

SEQ ID NO: 1268 - protein, 744 aa, synthetic construct
  REGION 1..744: note = Synthetic
MAADGYLPDWLEDNLSEGIREWWALKPGAPKPKANQQKQDDGRGLVLPGYKYLGPFNGLDKGEPVNAADAAALEHDKAYDQQLQAGDNPYLRYNHADAEFQERLQEDTSFGGNLGRAVFQAKKRLLEPLGLVEEAAKTAPGKKRPVEQSPQEPDSSAGIGKSGAQPAKKRLNFGQTGDTESVPDPQPIGEPPAAPSGVGSLTMASGGGAPVADNNEGADGVGNASGNWHCDSQWLGDRVITTSTRTWALPTYNNHLYKQISSASTGATNDNTYFGYSTPWGYFDFNRFHCHFSPRDWQRLINNNWGFRPKRLNFKLFNIQVKEVTDNNGVKTIANNLTSTVQVFTDSDYQLPYVLGSAHEGCLPPFPADVFMIPQYGYLTLNDGSQAVGRSSFYCLEYFPSQMLRTGNNFQFSYEFENVPFHSSYAHSQSLDRLMNPLIDQYLYYLSKTINGSGQNQQTLKFSVAGPSNMAVQGRNYIPGPSYRQQRVSTTVTQNNNSEFAWPGASSWALNGRNSLMNPGPAMASHKEGEDRFFPLSGSLIFGKQGTGRDNVDADKVMITNEEEIKTTNPVATESYGQVATNHQGQSGRGDLGLSAQAAQTGWVQNQGILPGMVWQDRDVYLQGPIWAKIPHTDGNFHPSPLMGGFGMKHPPPQILIKNTPVPADPPTAFNKDKLNSFITQYSTGQVSVEIEWELQKENSKRWNPEIQYTSNYYKSNNVEFAVNTEGVYSEPRPIGTRYLTRNL

SEQ ID NO: 1269 - protein, 746 aa, synthetic construct
  REGION 1..746: note = Synthetic
MAADGYLPDWLEDNLSEGIREWWALKPGAPQPKANQQHQDNARGLVLPGYKYLGPGNGLDKGEPVNAADAAALEHDKAYDQQLKAGDNPYLRYNHADAEFQERLQEDTSFGGNLGRAVFQAKKRVLEPLGLVEEGAKTAPGKKRPVEPSPQRSPDSSTGIGKTGQQPAKKRLNFGQTGDTESVPDPQPIGEPPAAPAAVGPTTMASGGGAPMADNNEGADGVGNASGNWHCDSTWLGDRVITTSTRTWALPTYNNHLYKQISNGTSGGATNDNTYFGYSTPWGYFDFNRFHCHFSPRDWQRLINNNWGFRPKRLNFKLFNIQVKEVTDNNGVKTIANNLTSTVQVFTDSDYQLPYVLGSAHEGCLPPFPADVFMIPQYGYLTLNDGSQAVGRSSFYCLEYFPSQMLRTGNNFQFSYEFENVPFHSSYAHSQSLDRLMNPLIDQYLYYLSKTINGSGQNQQTLKFSVAGPSNMAVQGRNYIPGPSYRQQRVSTTVTQNNNSEFAWPGASSWALNGRNSLMNPGPAMASHKEGEDRFFPLSGSLIFGKQGTGRDNVDADKVMITNEEEIKTTNPVATESYGQVATNHQGQSGRGDLGLSAQAAQTGWVQNQGILPGMVWQDRDVYLQGPIWAKIPHTDGNFHPSPLMGGFGMKHPPPQILIKNTPVPADPPTAFNKDKLNSFITQYSTGQVSVEIEWELQKENSKRWNPEIQYTSNYYKSNNVEFAVNTEGVYSEPRPIGTRYLTRNL

SEQ ID NO: 1270 - protein, 745 aa, synthetic construct
  REGION 1..745: note = Synthetic
MAADGYLPDWLEDNLSEGIREWWALKPGAPQPKANQQHQDNARGLVLPGYKYLGPGNGLDKGEPVNAADAAALEHDKAYDQQLKAGDNPYLKYNHADAEFQERLKEDTSFGGNLGRAVFQTKKRVLEPFGLVEEGAKTAPGKKRPVEQSPQEPDSSSGIVKTGQQPAKKRLNFGQTGDTESVPDPQPLGEPPATPSGVGSLTMASGGGAPMADNNEGADGVGNASGNWHCDSTWLGDRVITTSTRTWALPTYNNHLYKQISNGTSGGATNDNAYFGYSTPWGYFDFNRFHCHFSPRDWQRLINNNWGFRPKRLNFKLFNIQVKEVTDNNGVKTIANNLTSTVQVFTDSDYQLPYVLGSAHEGCLPPFPADVFMIPQYGYLTLNDGSQAVGRSSFYCLEYFPSQMLRTGNNFQFSYEFENVPFHSSYAHSQSLDRLMNPLIDQYLYYLSKTINGSGQNQQTLKFSVAGPSNMAVQGRNYIPGPSYRQQRVSTTVTQNNNSEFAWPGASSWALNGRNSLMNPGPAMASHKEGEDRFFPLSGSLIFGKQGTGRDNVDADKVMITNEEEIKTTNPVATESYGQVATNHQGQSGRGDLGLSAQAAQTGWVQNQGILPGMVWQDRDVYLQGPIWAKIPHTDGNFHPSPLMGGFGMKHPPPQILIKNTPVPADPPTAFNKDKLNSFITQYSTGQVSVEIEWELQKENSKRWNPEIQYTSNYYKSNNVEFAVNTEGVYSEPRPIGTRYLTRNL

SEQ ID NO: 1271 - protein, 745 aa, synthetic construct
  REGION 1..745: note = Synthetic
MAADGYLPDWLEDNLSEGIREWWDLKPGAPKPKANQQKQDDGRGLVLPGYKYLGPFNGLDKGEPVNAADAAALEHDKAYDQQLKAGDNPYLRYNHADAEFQERLQEDTSFGGNLGRAVFQAKKRVLEPFGLVEEGAKTAPGKKRPVEQSPQEPDSSSGIGKTGQQPAKKRLNFGQTGDSESVPDPQPLGEPPATPAAVGPTTMASGGGAPVADNNEGADGVGSSSGNWHCDSQWLGDRVITTSTRTWALPTYNNHLYKQISNSTSGGSSNDNAYFGYSTPWGYFDFNRFHCHFSPRDWQRLINNNWGFRPKRLNFKLFNIQVKEVTDNNGVKTIANNLTSTVQVFTDSDYQLPYVLGSAHEGCLPPFPADVFMIPQYGYLTLNDGSQAVGRSSFYCLEYFPSQMLRTGNNFQFSYEFENVPFHSSYAHSQSLDRLMNPLIDQYLYYLSKTINGSGQNQQTLKFSVAGPSNMAVQGRNYIPGPSYRQQRVSTTVTQNNNSEFAWPGASSWALNGRNSLMNPGPAMASHKEGEDRFFPLSGSLIFGKQGTGRDNVDADKVMITNEEEIKTTNPVATESYGQVATNHQGQSGRGDLGLSAQAAQTGWVQNQGILPGMVWQDRDVYLQGPIWAKIPHTDGNFHPSPLMGGFGLKHPPPQILIKNTPVPADPPAEFSATKFASFITQYSTGQVSVEIEWELQKENSKRWNPEVQYTSNYAKSANVDFTVDNNGLYTEPRPIGTRYLTRPL

SEQ ID NO: 1272 - protein, 731 aa, synthetic construct
  REGION 1..731: note = Synthetic
MAADGYLPDWLEDNLSEGIREWWALKPGAPQPKANQQKQDDGRGLVLPGYKYLGPFNGLDKGEPVNEADAAALEHDKAYDQQLKAGDNPYLRYNHADAEFQERLQEDTSFGGNLGRAVFQAKKRVLEPLGLVEEGAKTAPGKKRPVEPDSSSGIGKSGQQPAKKRLNFGQTGDSESVPDPQPLSEPPAGPSGLGSGTMAAGGGAPMADNNEGADGVGNVSGNWHCDSTWLGDRVITTSTRTWALPTYNNHLYKQISNGTSGGSSNDNTYFGYSTPWGYFDFNRFHCHFSPRDWQRLINNNWGFRPKKLNFKLFNIQVKEVTQNEGTKTIANNLTSTVQVFTDSEYQLPYVLGSAHQGCLPPFPADVFMIPQYGYLTLNNGSQAVGRSSFYCLEYFPSQMLRTGNNFTFSYTFEDVPFHSSYAHSQSLDRLMNPLIDQYLYYLSRTQTNGTNATQTLLFAQAGPQNMSAQAKNWLPGPCYRQQRVSTTVSQNNNSNFTWTGATKYHLNGRDSLVSPGVAMATHKDDEERFFPSSGVLMFGKQGAGKDNVEYTNVMLTSEEEIKTTNPVATEQYGVVADNLQQTNSAPIVGAVNSQGALPGMVWQNRDVYLQGPIWAKIPHTDGNFHPSPLMGGFGLKHPPPQILIKNTPVPADPPVNFTDAKLASFITQYSTGQVSVEIEWELQKENSKRWNPEIQYTSNYYKSANVDFAVNADGVYSEPRPIGTRYLTRNL

SEQ ID NO: 1273 - protein, 731 aa, synthetic construct
  REGION 1..731: note = Synthetic
MAADGYLPDWLEDNLSEGIREWWALKPGAPQPKANQQKQDDGRGLVLPGYKYLGPFNGLDKGEPVNEADAAALEHDKAYDQQLKAGDNPYLRYNHADAEFQERLQEDTSFGGNLGRAVFQAKKRVLEPLGLVEEGAKTAPGKKRPVEPDSSSGIGKSGQQPAKKRLNFGPTGDSESVPDPQPLSEPPAGPSGLGSGTMAAGGGAPMADNNEGADGVGNVSGNWHCDSTWLGDRVITTSTRTWALPTYNNHLYKQISNGTSGGSSNDNTYFGYSTPWGYFDFNRFHCHFSPRDWQRLINNNWGFRPKKLNFKLFNIQVKEVTQNEGTKTTANNLTSTVQVFTDSEYQLPYVLGSAHQGCLPPFPADVFMIPQYGYLTLNNGSQAVGRSSFYCLEYFPSQMLRTGNNFTFSYTFEDVPFHSSYAHSQSLDRLMNPLIDQYLYYLSRTQTNGTNATQTLLFAQAGPQNMSAQAKNWLPGPCYRQQRVSTAVSQNNNSNFTWTGATKYHLNGRDSLVNPGVAMATHKDDEERFFPSSGVLMFGKQGAGKDNVEYTNVMLTSEEEIKTTNPVATEQYGVVADNLQQTNSAPIVGAVNSQGALPGMVWQNRDVYLQGPIWAKIPHTDGNFHPSPLMGGFGLKHPPPQILIKNTPVPADPPVNFTDAKLASFITQYSTGQVSVEIEWELQKENSKRWNPEIQYTSNYYKSANVDFAVNADGVYSEPRPIGTRYLTRNL

SEQ ID NO: 1274 - protein, 731 aa, synthetic construct
  REGION 1..731: note = Synthetic
MAADGYLPDWLEDNLSEGIREWWALKPGAPQPKANQQKQDDGRGLVLPGYKYLGPFNGLDKGEPVNEADAAALEHDKAYDQQLKAGDNPYLRYNHADAEFQERLQEDTSFGGNLGRAVFQAKKRVLEPLGLVEEGAKTAPGKKRPVEPDSSSGIGKSGRQPAKKRLNFGQTGDSESVPDPQPLSEPPAGPSGLGSGTMAAGGGAPMADNNEGADGVGNASGNWHCDSTWLGDRVITTSTRTWALPTYNNHLYKQISNGTSGGSSNDNTYFGYSTPWGYFDFNRFHCHFSPRDWQRLINNNWGFRPKRLNFKLFNIQVKEVTQNEGTKTIANNLTSTVQVFTDSKYQLPYVLGSAHQGCLPPFPADVFMIPQYGYLTLNNGSQAVGRSSFYCLEYFPSQMLRTGNNFTFSYTFEDVPFHSSYAHSQSLDRLMNPLIDQYLYYLSRTQTNGTNATQTLLFAQAGPQNMSAQAKNWLPGPCYRQQRVSTTVSQNNNSNFTWTGATKYHLNGRDSLVNPGVAMATHKDDEERFFPSSGVLMFGKQGAGKDNVEYTNVMLTSEEEIKTTNPVATEQYGVVADNLQQTNSAPIVGAVNSQGALPGMVWQNRDVYLQGPIWAKIPHTDGNFHPSPLMGGFGLKHPPPQILIKNTPVPADPPVNFTDAKLASFITQYSTGQVSVEIEWELQKENSKRWNPEIQYTSNYYKSANVDFAVNADGVYSEPRPIGTRYLTRNL

SEQ ID NO: 1275 - protein, 738 aa, synthetic construct
  REGION 1..738: note = Synthetic
MAADGYLPDWLEDNLSEGIREWWDLKPGAPKPKANQQKQDDGRGLVLPGYKYLGPFNGLDKGEPVNAADAAALEHDKAYDQQLKAGDNPYLRYNHADAEFQERLQEDTSFGGNLGRAVFQAKKRVLEPLGLVEEGAKTAPGKKRPVEPSPQRSPDSSTGIGKKGQQPARKRLNFGQTGDSESVPDPQPIGEPPAAPSSVGSGTMAAGGGAPMADNNEGADGVGSSSGNWHCDSTWLGDRVITTSTRTWALPTYNNHLYKQISNGTSGGSTNDNTYFGYSTPWGYFDFNRFHCHFSPRDWQRLINNNWGFRPKRLSFKLFNIQVKEVTQNEGTKTIANSLTSTIQVFTDSEYQLPYVLGSAHQGCLPPFPADVFMIPQYGYLTPNNGSQAVGRSSFYCLEYFPSQMLRTGNNFSFSYTFEDVPFHSSYAHSQSLDRLMNPLIDQYLYYLSRTQSTGGTAGTQQLLSSQAGPSNMSAQARNWLPGPCYRQQRVSTTLSQNNNSNFAWTGATKYHLNGRDSLVNPGVAMATNKDDEDRFFPSSGILMFGKQGAGKDNVDYSNVMLTSEEEIKTTNPVATEQYGVVADNLQQQNTAPIVGAVNSQGALPGMVWQNRDVYLQGPIWAKIPHTDGNFHPSPLMGGFGLKHPPPQILIKNTPVPADPPTAFNQAKLNSFITQYSTGQVSVEIEWELQKENSKRWNPEIQYTSNYYKSTNVDFAVNTEGVYSEPRPIGTRYLTRNL

SEQ ID NO: 1276 - protein, 738 aa, synthetic construct
  REGION 1..738: note = Synthetic
MAADGYLPDWLEDNLSEGIREWWDLKPGAPKPKANQQKQDDGRGLVLPGYKYLGPFNGLDKGEPVNAADAAALEHDKAYDQQLKAGDNPYLRYNHADAEFQERLQEDTSFGGNLGRAVFQAKKRVLEPLGLVEEGAKTAPGKKRPVEPSPQRSPDSSTGIGKKGQQPARKRLNFGQTGDSESVPDPQPIGEPPAAPSSVGSGTMAAGGGAPMADNNEGADGVGSSSGNWHCDSTWLGDRVITTSTRTWALPTYNNHLYKQISNGTSGGSTNDNTYFGYSTPWGYFDFNRFHCHFSPRDWQRLINNNWGFRPKRLSFKLFNIQVKEVTQNEGTKTIANNLTSTIQVFTDSEYQLPYVLGSAHQGCLPPFPADVFMIPQYGYLTLNNGSQAVGRSSFYCLEYFPSQMLRTGNNFSFSYTFEDVPFHSSYVHSQSLDRLMNPLIDQYLYYLSRTQSTGGTAGTQQLLFSQAGPSNMSAQARNWLPGPCYRQQRVSTTLSQNNNSNFAWTGATKYHLNGRDSLVNSGVAMATNKDDEDRFFPSSGILMFGKQGAGKDNVDYSNVMLTSEEEIKTTNPVATEQYGVVADNLQQQNTAPIVGAVNSQGALPGMVWQNRDVYLQGPIWAKIPHTDGNFHPSPLMGGFGLKHPPPQILIKNTPVPADPPTAFNQAKLNSFITQYSTGQVSVEIEWELQKENSKRWNPEIQYTSNYYKSTNVDFAVNTEGVYSEPRPIGTRYPTRNL

SEQ ID NO: 1277 - protein, 738 aa, synthetic construct
  REGION 1..738: note = Synthetic
MAADGYLPDWLEDNLSEGIREWWDLKPGAPKPKANQQKQDDGRGLVLPGYKYLGPFNGLDKGEPVNAADAAALEHDKAYDQQLKAGDNPYLRYNHADAEFQERLQEDTSFGGNLGRAVFQAKKRVLEPLGLVEEGAKTAPGKKRPVEPSPQRSPDSSTGIGKKGQQPARKRLNFGQTGDSESVPDPQPIGEPPAAPSSVGSGTMAAGGGAPMADNNEGADGVGSSSGNWHCDSTWLGDRVITTSTRTWALPAYNNHLYKQISNGTSGGSTNDNTYFGYSTPWGYFDFNRFHCHFSPRDWQRLINNNWGFRPKRLSFKLFNIQVKEVTQNEGTKTIANNLTSTIQVFTDSEYQLPYVLGSAHQGCLPPFPADVFMIPQYGYLTLNNGSQAVGRSSFYCLEYFPSQMLRTGNNFSFSYTFEDVPFHSSYAHSQSLDRLMNPLIDQYLYYLSRTQSTGGTAGTQQLLFSQAGPSNMSAQARNWLPGPCYRQQRVSTTLSQNNNSNFAWTGATKYHLSGRDSLVNPGVAMATNKDDEDRFFPSSGILMFGKQGAGKDNVDYSNVMLTSEEEIKTTNPVATEQYGVVADNLQQQNTAPIVGAVNSQGALPGMVWQNRDVYLQGPIWAKIPHTDGNFHPSPLMGGFGLKHPPPQILIKNTPVPADPPTAFNQAKLNSSITQYSTGQVSVEIEWELQKENSKRWNPEIQYTSNYYKSTNVDFAVNTEGVYSEPRPIGTRYLTRNL

SEQ ID NO: 1278 - protein, 738 aa, synthetic construct
  REGION 1..738: note = Synthetic
MAADGYLPDWLEDNLSEGIREWWDLKPGAPKPKANQQKQDDGRGLVLPGYKYLGPFNGLDKGEPVNAADAAALEHDKAYDQQLKAGDNPYLRYNHADAEFQERLQEDTSFGGNLGRAVFQAKKRVLEPLGLVEEGAKTAPGKKRPVEPSPQRSPDSSTGIGKKGQQPARKRLNFGQTGDSESVPDPQPIGEPPAAPSSVGSGTMAAGGGAPMADNNEGADGVGSSSGNWHCDSTWLGDRVITTSTRTWALPTYNNHLYKQISNGTSGGSTNDNTYFGYSTPWGYFDFNRFHCHFSPRDWQRLINNNWGFRPKRLSFKLFNIQVKEVTQNEGTKTIANNLTSTIQVFTDSEYQLPYVLGSAHQGCLPPFPADVFMIPQYGYLTLNNGSQAVGRSSFYCLEYFPSQMLRTGNNFSFSYTFEDVPFHSSYAHSQSLDRLMNPLIDQYLYYLSRTQSTGGTAGTQQLLFSQAGPSNMSAQARNWLPGPCYRQQRVSTTLSQNNNSNFAWTGATKYHLNGRDSLVNPGVAMATNKDDEDRFFPSSGILMFGKQGAGKDNVDYSNVMLTSEEEIKTTNPVATEQYGVVADNLQQQNTAPIVGAVNSQGALPGMVWQNRDVYLQGPIWAKIPHTDGNFHPSPLMGGFGLKHPPPQILIKNTPVPADPPTAFNQAKLNSFITQYSTGQVSVEIVWELQKENSKRRNPEIQYTSNYYKSTNVDFAVNTEGVYSEPRPIGTRYLTRNL

SEQ ID NO: 1279 - protein, 738 aa, synthetic construct
  REGION 1..738: note = Synthetic
MAADGYLPDWLEDNLSEGIREWWDLKPGAPKPKANQQKQDDGRGLVLPGYKYLGPFNGLDKGEPVNAADAAALEHDKAYDQQLKAGDNPYLRYNHADAEFQERLQEDTSFGGNLGRAVFQAKKRVLEPLGLVEEGAKTAPGKKRPVEPSPQRSPDSSTGIGKKGQQPARKRLNFGQTGDSESVPDPQPIGEPPAAPSSVGSGTMAAGGGAPMADNNEGADGVGSSSGNWHCDSTWLGDRVITTSTRTWALPTYNNHLYKQISNGTSGGSTNDNTYFGYSTPWGYFDFNRFHCHFSPRDWQRLINNNWGFRPKRLSFKLFNIQVKEVTQNEGTKTIANNLTSTIQVFTDSEYQLPYVLGSAHQGCLPPFPADVFMIPQYGYLTLNNGSQAVGRSSFYCLEYFPSQMLRTGNNFSFSYTFEDVPFHSSYAHSQSLDRLMNPLIDQYLYYLSRTQSTGGTAGTQQLLFSQAGPSNMSAQARNWLPGPCYRQQRVSTTLSQNNNSNFAWTGATKYHLNGRDSLVNPGVAMATNKDDEDRFFPPSGILMFGKQGAGKDNVDYSNVMLTSEEEIKTTNPVATEQYGVVADNLQQQNTAPIVGAVNSQGALPGMVWQNRDVYLQGPIWAKIPHTDGNFHPSPLMGGFGLKHPPPQILIKNTPVPADPPTAFNQAKLNSFITQYSTGQVSVVIEWELQKENSKRWNPEIQYTSNYYKSTNVDFAVNTEGVYSELRPIGTRYLTRNL

SEQ ID NO: 1280 - protein, 738 aa, synthetic construct
  REGION 1..738: note = Synthetic
MAADGYLPDWLEDNLSEGIREWWDLKPGAPKPKANQQKQDDGRGLVLPGYKYLGPFNGLDKGEPVNAADAAALEHDKAYDQQLKAGDNPYLRYNHADAEFQERLQEDTSFGGNLGRAVFQAKKRVLEPLGLVEEGAKTAPGKKRPVEPSPQRSPDSSTGIGKKGQQPARKRLNFGQTGDSESVPDPQPIGEPPAAPSSVGSGTMAAGGGAPMADNNEGADGVGSSSGNWHCDSTWLGDRVITTSTRTWALPTYNNHLYKQISNGTSGGSTNDNTYFGYSTPWGYFDFNRFHCHFSPRDWQRLINNNWGFRPKRLSFKLFNIQVKEVTQNEGTKTIANNLTSTIQVFTDSEYQLPYVLGSAHQGCLPPFPADVFMIPQYGYLTLNNGSQAVGRSSFYCLEYFPSQMLRTGNNFSFSYTFEDVPFHSSYAHSQSLDRLMNPLIDQYLYYLSRTQSTGGTAGTQQLLFSQAGPSNMSAQARNWLPGPCYRQQRVSTTLSQNNNSNFAWTGATKYHLNGRDSLVNPGVAMATNKDDEDRFFPSSGILMFGKQGAGKDNVDYSNVMLTSEEEIKATNPVATEQYGVVADNLQQQNTAPIVGAVNSQGALPGMVWQNRDVYLQGPIWAKIPHTDGNFHPSPLMGGFGLKHPPPQILIKNTPVPADPPTAFNQAKLNSFITQYSTGQVSVEIEWELQKENSKRWNPEIQYTSNYYKSTNVDFAVNTEGVYSEPRPIGTRYLTRNL

SEQ ID NO: 1281 - protein, 738 aa, synthetic construct
  REGION 1..738: note = Synthetic
MAADGYLPDWLEDNLSEGIREWWDLKPGAPKPKANQQKQDDGRGLVLPGYKYLGPFNGLDKGEPVNAADAAALEHDKAYDQQLKAGDNPYLRYNHADAEFQERLQEDTSFGGNLGRAVFQAKKRVLEPLGLVEEGAKTAPGKKRPVEPSPQRSPDSSTGIGKKGQQPARKRLNFGRTGDSESVPDPQPIGEPPAAPSSVGSGTMAAGGGAPMADNNEGADGVGSSSGNWHCDSTWLGDRVITTSTRTWALPTYNNHLYKQISNGTSGGSTNDNTYFGYSTPWGYLDFNRFHCHFSPRDWQRLINNNWGFRPKRLSFKLFNIQVKEVTQNEGTKTIANNLASTIQVFTDSEYQPPYVLGSAHQGCLPPFPADVFMIPQYGYLTLNNGSQAVGRSSFYCLEYFPSQMLRTGNNFSFSYTFEDVPFHSSYAHSQSLDRLMNPLIDQYLYYLSRTQSTGGTAGTQQLLFSRAGPSNMSAQARNWLPGPCYRQQRVSTTLSQNNNSNFAWTGATKYHLNGRDSLVNPGVAMATNKDDEDRFFPSSGILMFGKQGAGKDNVDYSNVMLTSEEEIKTTNPVATEQYGVVADNLQQQNTAPTVGAVNSQGALPGMVWQNRDVYLQGPIWAKIPHTDGNFHPSPLMGGFGLKHPPPQILIKNTPVPADPPTAFNQAKLNSFIAQYSTGQVSVEIEWELQKENSKRWNPEIQYTSNYYKSTNADFAVNTEGVYSEPRPIGTRYLTRNL

SEQ ID NO: 1282 - protein, 738 aa, synthetic construct
  REGION 1..738: note = Synthetic
MAADGYLPDWLEDNLSEGIREWWDLKPGAPKPKANQQKQDDGRGLVLPGYKYLGPFNGLDKGEPVNAADAAALEHDKAYDQQLKAGDNPHLRYNHADAEFQERLQEDTSFGGNLGRAVFQAKKRVLEPLGLVEEGAKTAPGKKRPVEPSPQRSPDSSTGIGKKGQQPARKRLNFGQTGDSESVPDPQLIGEPPAAPSSVGSGTMAAGGGAPMADNNEGADGVGSSSGNWHCDSTWLGDRVITTSTRTWALPTYNNHLYKQISNGTSGGSTNDNTYFGYSTPWGYFDFNRFHCHFSPRDWQRLINNNWGFRPKRLSFKLFNIQVKEVTQNEGTKTIANNLTSTIQVFTDSEYQLPYVLGSAHQGCLPPFPADVFMIPQYGNLTLNNGSQAVGRSSFYCLEYFPSQMLRTGNNFSFSYTFEDVPFHSSYAHSQSLDRLMNPLIDQYLYYLSRTQSTGGTAGTQQLLFSQAGPSNMSAQARNWLPGPCYRQQRVSTTLSQNNNSNFAWTGATKYHLNGRDSLVNPGVAMATNKDDEDRFFPSSGILMFGKQGAGKDNMGYSNVMLTSEEEIKTTNPVATEQYGVVADNLQQQNTAPIVGAVNSQGALPGMVWQNRDVYLQGPIWAKIPHTDGNFHPSPLMGGFGLKHPPPQILIKNTPVPADPPTAFNQAKLNSFITQYGTGQVSVEIEWELQKENSKRWNPEIQYTSNYYKSTNVDFAVNTEGVYSEPRPIGTRYLTRNL

SEQ ID NO: 1283 - protein, 738 aa, synthetic construct
  REGION 1..738: note = Synthetic
MVADGYLPDWLEDNLSEGIREWWDLKPGAPKPKANQQKQGDGRGLVLPGYKYLGPFNGLDKGEPVNAADAAALEHDKAYDQQLKAGDNPYLRYNHADAELQERLQEDTSFGGNLGRAVFQAKKRVLEPLGLVEEGAKTAPGKKRPVEPSPQRSPDSSTGIGKKGQQPARKRLNFGQTGDSESVPDPQPIGEPPAAPSSVGSGTMAAGGGAPMADNNEGADGVGSSSGNWHCDSTWLGDRVITTSTRTWALPTYNNHLYKQISNGTSGGSTNDNTYFGYSTPWGYFDFNRFHCHFSPRDWQRLINNNWGFRPKRLSFKLFNIQVKEVTQNEGTKTIANNLTSTIQVFTDSEYQLPYVLGSAHQGCQPPFPADVFMIPQYGYLTLNNGSQAVGRSSFYCLEYFPSQMLRTGNNFSFSYTFEDVPFHSSYAHSQSLDRLMNPLIDQYLYYLSRTQSTGGTAGTQQLLFSQAGPSNMSAQARNWLPGPCYRQQRVSTTLSQNNNSNFAWTGATKYHLNGRDSLVNPGVAMATNKDDEDRFFPSSGILMFGKQGAGKDNVDYSNVMLTSEEEIKTTNPVATEQYGVVADNLQQQNTAPIVGAVNSQGALPGMVWQNRDVYLQGPIWAKIPHTDGNFHPSPLMGGFGLKHPPPQILIKNTPVPADPPTAFNQAKLNSFITQYSTGQVSVEIEWEPQKENSKRWNPEIQYTSNYYKSTNVDFAVNTEGVYSEPRPIGTRYLTRNL

SEQ ID NO: 1284 - protein, 738 aa, synthetic construct
  REGION 1..738: note = Synthetic
MAADGYLPDWLEDNLSEGIREWWALKPGAPKPKANQQKQDDGRGLVLPGYKYLGPFNGLDKGEPVNAADAAALEHDKAYDQQLQAGDNPYLRYNHADAEFQERLQEDTSFGGNLGRAVFQAKKRVLEPLGLVEEGAKTAPGKKRPVEPSPQRSPDSSTGIGKKGQQPARKRLNFGQTGDSESVPDPQPIGEPPAAPSSVGSGTMAAGGGAPMADNNEGADGVGSSSGNWHCDSTWLGDRVITTSTRTWALPTYNNHLYKQTSNGTSGGSTNDNTYFGYSTPWGYFDFNRFHCHFSPRDWQRLINNNWGFRPKRLSFKLFNIQVKEVTQNEGTKTIANNLTSTIQVFTDSEYQLPYVLGSAHQGCLPPFPADVFMIPQYGYLTLNNGSQAVGRSSFYCLEYFPSQMLRTGNNFSFSYTFEDVPFHSSYAHSQSLDRLMNPLIDQYLYYLSRTQSTGGTAGTQQLLFSQAGPSNMSAQARNWLPGPCYRQQRVSTTLSQNNNSNFAWTGATKYHLNGRDSLVNPGVAMATNKDDEDRFFPSSGILMFGKQGAGKDNVDYSNVMLTSEEEIKTTNPVATEQYGVVADNLQQQNTAPIVGAVNSQGALPGMVWQNRDVYLQGPIWAKIPHTDGNFHPSPLMGGFGLKHPPPQILIKNTPVPADPPTAFNQAKLNSFITQYSTGQVSAEIEWELQKENSKRWNPEIQYTSNYYKSTNVDFAVNTEGVYSEPRPIGTRYLTRNL

SEQ ID NO: 1285 - protein, 738 aa, synthetic construct
  REGION 1..738: note = Synthetic
MAADGYLPDWLEDNLSEGIREWWDLKPGAPKPKANQQKQDDGRGLVLPGYKYLGPFNGLDKGEPVNAADAAALEHDKAYDQQLKAGDNPYLRYNHADAEFQERLQEDTSFGGNLGRAVFQAKKRVLEPLGLVEEAAKTAPGKKRPVEPSPQRSPDSSTGIGKKGQQPARKRLNFGQTGDSESVPDPQPIGEPPAAPSSVGSGTMAAGGGAPMADNNEGADGVGSSSGNWHCDSTWLGDRVITTSTRTWALPTYNNHLYKQISNGTSGGSTNDNTYFGYSTPWGYFDFNRFHCHFSPRDWQRLINNNWGFRPKRLSFKLFNIQVKEVTQNEGTKTIANNLTSTIQVFTDSEYQLPYVLGSAHQGCLPPFPADVFMIPQYGYLTLNNGSQAVGRSSFYCLEYFPSQMLRTGNNFSFSYTFEDVPFHSSYAHSQSLDRLMNPLIDQYLYYLSRTQSTGGTAGTQQLLFSQAGPSNMSAQARNWLPGPCYRQQRVSTTLSQNNNSNFAWTGATKYHLNGRDSLVNPGVAMATNKDDEDRFFPSSGILMFGKQGAGKDNVDYSNVMLTSEEEIKTTNPVATEQYGVVADNLQQQNTAPIVGAVNSQGALPGMVWQNRDVYLQGPIWAKIPHTDGNFHPSPLMGGFGLKHPPPQILIKSTPVPADPPTAFNQAKLNSFITQYSTGQVSVEIEWELQKENSKCWNPEIQYTSNYYKSTNVDFAVNTEGVYSEPRPIGTRYLTRNL

SEQ ID NO: 1286 - protein, 738 aa, synthetic construct
  REGION 1..738: note = Synthetic
MAADGYLPDWLEDNLSEGIREWWDLKPGAPKPKANQQKQDDGRGLVLPGYKYLGPFNGLDKGEPVNAADAAALEHDKAYDQQLKAGDNPYLRYNHADAEFQERLQEDTSFGGNLGRAVFQAKKRVLEPLGLVEEGAKTAPGKKRPVEPSPQRSPDSSTGIGKKGQQPARKRLNFGQTGDSESVPDPQPIGEPPAAPSSVGSGTMAAGGGAPMADNNEGADGVGSSSGNWHCDSTWLGDRVITTSTRTWALPTYNNHLYKQISNGTSGGSTNDNTYFGYSTPWGYFDFNRFHCHFSPRDWQRPINNNWGFRPKRLSFKLFNIQVKEVTQNEGTKTIANNLTSTIQVFTDSEYQLPYVLGSAHQGCLPPFPADVFMIPQYGYLTLNNGSQAVGRSSFYCLEYFPSQMLRTGNNFSFSYPFEDVPFHSSYAHSQSLDRLMNPLIDQYLYYLSRTQSTGGTAGTQQLLFSQAGPSNMSAQARNWLPGPCYRQQRVSTTLSQNNNSNFAWTGATKYHLNGRDSLVNPGVAMATNKDDEDRFFPSSGILMFGKQGAGKDNVDYSNVMLTSEEEIKTTNPVATEQYGVVADNLQQQDTAPIVGAVNSQGALPGMVWQNRDVYLQGPIWAKIPHTDGNFHPSPLMGGFGLKHPPPQVLIKNTPVPADPPTAFNQAKLNSFITQYSTGQVSVEIEWELQKENSKRWNPEIQYTSNYYKSTNVDFAVNTEGVYSEPRPIGTRYLTRNL

SEQ ID NO: 1287 - protein, 738 aa, synthetic construct
  REGION 1..738: note = Synthetic
MAADGYLPDWLEDNLSEGIREWWDLKPGAPKPKANQQKQDDGRGLVLPGYKYLGPFNGLDKGEPVNAADAAALEHDKAYDQQLKAGDNPYLRYNHADAEFQERLQEDTSFGGNLGRAVFQAKKRVLEPLGLVEEGAKTAPGKKRPVEPSPQRSPDSSTGIGKKGQQPAGKRLNFGQTGDSESVPDPQPIGEPPAAPSSVGSGTMAAGGGAPMADNNEGADGVGSSSGNWHCDSTWLGDRVITTSTRTWALPTYNNHLYKQISNGTSGGSTNDNTYFGYSTPWGYFDFNRFHCHFSPRDWQRLINNNWGFRPKRLSFKLFNIQVKEVTQNEGTKTIANNLTSTIQVFTDSEYQLPYVLGSAHQGCLPPFPADVFMIPQYGYLTLNNGSQAVGRSSFYCLEYFPSQMLRTGNNFSFSYTFEDVPFHSSYAHSQSLDRLMNPLVDQYLYYLSRTQSTGGTAGTQQLLFSQAGPSNMSAQARNWLPGPCYRQQRVSTTLSQNNNSNFAWTGATKYHLNGRDSLVNPGVAMATNKDDEDRFFPSSGILMFGKQGAGKDNVDYSNVMLTSEEEIKTTNPVATEQYGVVADNLQQQNTAPIVGAVNSQGALPGMVWQNRDVYLQGPIWAKIPHTDGNFHPSPLMGGFGLKHPPPQILIKNTPVPADPPTAFNQAKLNSFITQYSTGQVSVEIEWELQKENSKRWSPEIQYTSNYYKSTNVDFAVNTEGVYSEPRPIGTRYLTRNL

SEQ ID NO: 1288 - protein, 736 aa, synthetic construct
  REGION 1..736: note = Synthetic
MAADGYLPDWLEDNLSEGIREWWDLKPGAPKPKANQQKQDDGRGLVLPGYKYLGPFNGLDKGEPVNAADAAALEHDKAYDQQLKAGDNPYLRYNHADAEFQERLQEDTSFGGNLGRAVFQAKKRVLEPLGLVEEAAKTAPGKKRPVEPSPQRSPDSSTGIGKKGQQPARKRLNFGQTGDSESVPDPQPIGEPPAGPSGLGSGTMAAGGGAPMADNNEGADGVGNASGNWHCDSTWLGDRVITTSTRTWALPTYNNHLYKQISSQSAGSTNDNVYFGYSTPWGYFDFNRFHCHFSPRDWQRLINNNWGFRPKKLNFKLFNIQVKEVTTNDGVTTIANNLTSTVQVFSDSEYQLPYVLGSAHQGCLPPFPADVFMIPQYGYLTLNNGSQAVGRSSFYCLEYFPSQMLRTGNNFSFSYTFEDVPFHSSYAHSQSLDRLMNPLIDQYLYYLSRTQSTGGTAGTQQLLFSQAGPSNMSTQARNWLPGPCYRQQRVSTTLSQNNNSNFAWTGATKYHLNGRDSLVNPGVAMATNKDDEDRFFPSSGILMFGKQGAGKDNVDYSNVMLTSEEEIKTTNPVATEQYGVVADNLQQQNTAPIVGAVNSQGALPGMVWQNRDVYLQGPIWAKIPHTDGNFHPSPLMGGFGLKHPPPQILIKNTPVPADPPTAFNQAKLNSFITQYSTGQVSVEIEWELQKENSKRWNPEIQYTSNYYKSTNVDFAVNTEGAYSEPRPIGTRYLTRN

SEQ ID NO: 1289 - protein, 738 aa, synthetic construct
  REGION 1..738: note = Synthetic
MAADGYLPDWLEDNLSEGIREWWDLKPGAPKPKANQQKQDDGRGLVLPGYKYLGPFNGLDKGEPVNAADAAALEHDKAYDQQLKAGDNPYLRYNHADAEFQERLQEDTSFGGNLGRAVFQAKKRVLEPLGLVEEAAKTAPGKKRPVEPSPQRSPDSSTGIGKKGQQPARKRLNFGQTGDSESVPDPQPIGEPPAGPSGLGSGTMAAGGGAPMADNNEGADGVGNASGNWHCDSTWLGDRVITTSTRTWALPTYNNHLYKQISSQSAGSTNDNVYFGYSTPWGYFDFNRFHCHFSPRDWQRLINNNWGFRPKKLNFKLFNIQVKEVTTNDGVTTIANNPTSTVQVFSDSEYQLPYVLGSAHQGCLPPFPADVFMIPQYGYLTLNNGSQSVGRSSFYCLEYFPSQMLRTGNNFTFSYTFEDVPFHSSYAHSQSLDRLMNPLIDQYLYYLARTQSNAGGTAGNRELQFYQGGPTTMAEQAKNWLPGPCYRQQRVSTTLSQNNNSNFAWTGATKYHLNGRDSLVNPGVAMATNKDDEDRFFPSSGILMFGKQGAGKDNVDYSNVMLTSEEEIKTTNPVATEQYGVVADNLQQQNTAPIVGAVNSQGALPGMVWQNRDVYLQGPIWAKIPHTDGNFHPSPLMGGFGLKHPPPQILIKNTPVPADPPTAFNQAKLNSFITQYSTGQVSVEIEWELQKENSKRWNPEIQYTSNYYKSTNVDFAVNTEGVYSEPRPIGTRYLTRNL

SEQ ID NO: 1290 - protein, 737 aa, synthetic construct
  REGION 1..737: note = Synthetic
MAADGYLPDWLEDNLSEGIREWWDLKPGAPKPKANQQKQDDGRGLVLPGYKYLGPFNGLDKGEPVSAADAAALEHDKACDQRLKAGDNPYLRYNHADAEFQERLQEDTSFGGNLGRAVFQAKKRVLEPLGLVEEAAKTAPGKKGPVEPSPQRSPDSSTGIGKKGQQPARKRLNFGQTGDSESVPDPQPIGEPPAGPSGLGSGTMAAGGGAPMADNNEGADGVGNASGNWHCDSTWLGDRVITTSTRTWALPTYNNHLYKQISSQSAGSTNDNVYFGYSTPWGYFDFNRFHCHFSPRDWQRLINNNWGFRPKKLNFKLFNIQVKEVTTNDGVTTIANNLTSTVQVFSDSEYQLPYVLGSAHQGCLPPFPADVFMIPQYGYLTLNNGSQSVGRSSFYCLEYFPSQMLRTGNNFTFSYTFEDVPFHSSYAHSQSLDRLMNPLIDQYLYYLARTQSNAGGTAGNRELQFYQGGPTTMAEQAKNWLPGPCFRQQRVSKTLDQNNNSNFAWTGATKYHLNGRNSLVNPGVAMATHKDDEERFFPSSGVLIFGKTGAANKTTLENVLMTNEEEIRPTNPVATEEYGTVSSNLQAANTAAQTQVVNNQGALPGMVWQNRDVYLQGPIWAKIPHTDGNFHPSPLMGGFGLKHPPPQILIKNTPVPANPPEVFTPAKFASFITQYSTGQVSVEIEWELQKENSKRWNPEIQYTSNFDEQTGVDFAVDSQGVYSEPRPIGTRYLTRNL

SEQ ID NO: 1291 - protein, 737 aa, synthetic construct
  REGION 1..737: note = Synthetic
MAADGYLPDWLEDNLSEGIREWWDLKPGAPKPKANQQKQDDGRGLVLPGYKYLGPFNGLDKGEPVNAADAAALEHDKAYDQQLKAGDNPYLRYNHADAEFQERLQEDTSFGGNLGRAVFQAKKRVLEPLGLVEEAAKTAPGKKRPVEPSPQRSPDSSTGIGKKGQQPARKRLNFGQTGDSESVPDPQPIGEPPAGPSGLGSGTMAAGGGAPMADNNEGADGVGNASGNWHCDSTWLGDRVITTSTRTWALPTYNNHLYKQISSQSAGSTNDNVYFGYSTPWGYFDFNRFHCHFSPRDWQRLINNNWGFRPKKLNFKLFNIQVKEVTTNDGVTTIANNLTSTVQVFSDSEYQLPYVLGSAHQGCLPPFPADVFMIPQYGYLTLNNGSQSVGRSSFYCLEYFPSQMLRTGNNFTFSYTFEDVPFHSSYAHSQSLDRLMNPLIDQYLYYLARTQSNAGGTAGNRELQFYQGGPTTMAEQAKNWLPRPCFRQQRVSKTLDQNNNSNFAWTGATKYHLNGRNSLVNPGVAMATHKDDEERFFPSSGVLIFGKTGAANKTTLENVLMTNEEEIRPTNPVATEEYGTVSSNLQAANTAAQTQVVNNQGALPGMVWQNRDVYLQGPIWAKIPHTDGNFHPSPLMGGFGLKHPPPQILIKNTPVPANPPEVFTPAKFASFITQYSTGQVSVEIEWELQKENSKRWNPEIQYTSNFDKQTGVDFAVDSQGVYSEPRPIGTRYLTRNL

SEQ ID NO: 1292 - protein, 737 aa, synthetic construct
  REGION 1..737: note = Synthetic
MAADGYLPDWLEDNLSEGIREWWDLKPGAPKPKANQQKQDDGRGLVLPGYKYLGPFNGLDKGEPVNAADAAALEHDKAYDQQLKAGDNPYLRYNHADAEFQERLQEDTSFGGNLGRAVLQAKKRVLEPLGLVEEAAKTAPGKKRPVEPSPQRSPDSSTGIGKKGQQPARKRLNFGQTGDSESVPDPQPIGEPPAGPSGLGSGTMAAGGGAPMADNNEGADGVGNASGNWHCDSTWLGDRVITTSTRTWALPTYNNHLYKQISSQSAGSTNDNVYFGYSTPWGYFDFNRFHCHFSPRDWQRLINNNWGFRPKKLNFKLFNIQVKEVTTNDGVTTIANNLTSTVQVFSDSEYQLPYVLGSAHQGCLPPFPADVFMIPQYGYLTLNNGSQSVGRSSFYCLEYFPSQMLRTGNNFTFSYTFEDVPFHSSYAHSQSLDRLMNPLIDQYLYYLARTQSNAGGTAGNRELQFYQGGPTTMAEQAKNWLPGPCFRQQRVSKTLDQNNNSNFAWTGATKYHLNGRNSLVNPGVAMATHKDDEERFFPSSGVLIFGKTGAANKTTLENVLMTNEEEIRPTNPVATEEYGTVSSNLQAANTAAQTQVVNNQGALPGMVWQNRDVYLQGPIWAKIPHTDGNFHPSPLMGGFGLKHPPPQILIKNTPVPANPPEVFTPAKFASFITQYSTGQVSVEIEWELQKENSKRWNPEIQYTSNFDKQTGVDFAVDSQGVYSEPRPIGTRYLTRNL

SEQ ID NO: 1293 - protein, 737 aa, synthetic construct
  REGION 1..737: note = Synthetic
MAADGYLPDWLEDNLSEGIREWWDLKPGAPKPKANQQKQDDGRGLVLPGYKYLGPFNGLDKGEPVNAADAAALEHDKAYDQQLKAGDNPYLRYNHADAEFQERLQEDTSFGGNLGRAVFQAKKRVLEPLGLAEEAAKTAPGKKRPVEPSPQRSPDSSTGIGKKGQQPARKRLNFGQTGDSESVPDPQPIGEPPAGPSGLGSGTMAAGGGAPMADNNKGADGVGNASGNWHCDSTWLGDRVITTSTRTWALPTYNNHLYKQISSQSAGSTNDNVYFGYSTPWGYFDFNRFHCHFSPRDWQRLINNNWGFRPKKLNFKLFNIQVKEVTTGDGVTTIANNLTSTVQVFSDSEYQLPYVLGSAHQGCLPPFPADVFMIPQYGYLTLNNDSQSVGRSSFYCLEYFPSQMLRTGNNFTFSYTFEDVPFHSSYAHSQSLDRLMNPLIDQYLYYLARTQSNAGGTAGNRELQFYQGGPTTMAEQAKNWLPGPCFRQQRVSKTLDQNNNSNFAWTGATKYHLNGRNSLVNPGVAMATHKDDEERFFPSSGVLIFGKTGAANKTTLENVLMTNEEEIRPTNPVATEEYGTVSSNLQAANTAAQTQVVNNQGALPGMVWQNRDVYLQGPIWAKIPHTDGNFHPSPLMGGFGLKHPPPQILIKNTPVPANPPEVFTPAKFASFITQYSTGQVSVEIEWELQKENSKRWNPEIQYTSNFDKQTGVDFAVDSQGVYSEPRPIGTRYLTRNL

SEQ ID NO: 1294 - protein, 737 aa, synthetic construct
  REGION 1..737: note = Synthetic
MAADGYLPDWLEDNLSEGIREWWDLKPGAPKPKANQQKQDDGRGLVLPGYKYLGPFNGLDKGEPVNAADAAALEHDKAYDQQLKAGDNPYLRYNHADAEFQERLQEDTSFGGNLGRAVFQAKKRVLEPLGLVEEAAKTAPGKKRPVEPSPQRSPDSSTGIGKKGQQPARKRLNFGQTGDSESVPDPQPIGEPPAGPSGLGSGTMAAGGGAPMADNNKGADGVGNASGNWHCDSTWLGDRVITTSTRTWALPTYNNHLYKQISSQSAGSTNDNVYFGYSTPWGYFDFNRFHCHFSPRDWQRLINSNWGFRPKKLNFKLFNIQVKEVTTNDGVTTIANNLTSTVQVFSDSEYQLPYVLGSAHQGCLPPFPADVFMIPQYGYLTLNNGSQSVGRSSFYCLEYFPSQMLRTGNNFTFSYTFEDVPFHSSYAHSQSLDRLMNPLIDQYLYYLARTQSNAGGTAGNRELQFYQGGPTTMAEQAKNWLPGPCFRQQRVSKTLDQNNNSNFAWTGATKYHLNGRNSLVNPGVAMATHKDDEERFFPSSGVLIFGKTGAANKTTLENVLMTNEEEIRPTNPVATEEYGTVSSNLQAANTAAQTQVVNNQGALPGMVWQNRDVYLQGPIWAKIPHTDGNFHPSPLMGGFGLKHPPPQILIKNTPVPANPPEVFTPAKFASFITQYSTGQVSVEIEWELQKENSKRWNPEIQYTSNFDKQTGVDFAVDSQGVYSEPRPIGTRYLTRNL

SEQ ID NO: 1295 - protein, 737 aa, synthetic construct
  REGION 1..737: note = Synthetic
MAADGYLPDWLEDNLSEGIREWWDLKPGAPKPKANQQKQDDGRGLVLPGYKYLGPFNGLDKGEPVNAADAAALEHDKAYDQQLKAGDNPYLRYNHADAEFQERLQEDTSFGGNLGRAVFQAKKRVLEPLGLVEEAAKTAPGKKRPVEPSPQRSPDSSTGIGKKGQQPARKRLNFGQTGDSESVPDPQPLGEPPAGPSGLGSGTMAAGGGAPMADNNEGADGVGNASGNWHCDSTWLGDRVITTSTRTWALPTYNNHLYKQISSQSAGSTNDNVYFGYSTPWGYFDFNRFHCHFSPRDWQRLINNNWGFRPKKLNFKLFNIQVKEVTTNDGVTTIANNLTSTVQVFSDSEYQLPYVLGSAHQGCLPPFPADVFMIPQYGYLTLNNGSQSVGRSSFYCLEYFPSQVLRTGNNFTFSYTFEDVPFHSSYAHSQSLDRLMNPLIDQYLYYLARTQSNPGGTSGNRELQFYQGGPSTMAEQAKNWLPGPCFRQQRVSKTLDQNNNSNFAWTGATKYHLNGRNSLVNPGVAMATHKDDEDRFFPSSGVLIFGKTGATNKTTLENVLMTNEEEIRPTNPVATEEYGIVSSNLQAANTAAQTQVVNNQGALPGMVWQNRDVYLQGPIWAKIPHTDGNFHPSPLMGGFGLKHPPPQILIKNTPVPANPPEVFTPAKFASFITQYSTGQVSVEIEWELQKENSKRWNPEIQYTSNFDKQTGVDFAVDSQGVYSEPRPIGTRYLTRNL

SEQ ID NO: 1296 - protein, 737 aa, synthetic construct
  REGION 1..737: note = Synthetic
MAADGYLPDWLEDNLSEGIREWWDLKPGAPKPKANQQKQDDGRGLVLPGYKYLGPFNGLDKGEPVNAADAAALEHDKAYDQQLKAGDNPYLRYNHADAEFQERLQEDTSFGGNLGRAVFQAKKRVLEPLGLVEEGAKTAPGKKRPVEPSPQRSPDSSTGIGKKGQQPARKRLNFGQTGDSESVPDPQPIGEPPAAPSSVGSGTMAAGGGAPMADNNEGADGVGSSSGNWHCDSTRLGDRVITTSTRTWALPTYNNHLYKQISSQSAGSTNDNVYFGYSTPWGYFDFNRFHCHFSPRDWQRLINNNWGFRPKKLNFKLFNIQVKEVTTNDGVTTIANNLTSTVQVFSDSEYQLPYVLGSAHQGCLPPFPADVFMIPQYGYLTLNNGSQSVGRSSFYCLEYFPSQMLRTGNNFTFSYTFEDVPFHSSYAHSQSLDRLMNPLIDQYLYYLARTQSNAGGTAGNRELQFYQGGPTTMAEQAKNWLPGPCFRQRRVSKTLDQNNNSNFAWTGATKYHLNGRNSLVNPGVAMATHKDDEERFFPSSGVLIFGKTGAANKTTLENVLMTNEEEIRPTNPVATEEYGTVSSNLQAANTAAQTQVVNNQGALPGMVWQNRDVYLQGPIWAKIPHTDGNFHPSPLMGGFGLKHPPPQILIKNTPVPANPPEVFTPAKFASFITQYSTGQVSVEIEWELQKENSKRWNPEIQYTSNFDKQTGVDFAVDSQGVYSEPRPIGTRYLTRNL

SEQ ID NO: 1297 - protein, 738 aa, synthetic construct
  REGION 1..738: note = Synthetic
MAADGYLPDWLEDNLSEGIREWWDLKPGAPKPKANQQKQDDGRGLVLPGYKHLGPFNGLDKGEPVNAADAAALEHDKAYDQQLKAGDNPYLRYNHADAEFQERLQEDTSFGGNLGRAVFQAKKRVLEPLGLVEEGAKTAPGKKRPVEPSPQRSPDSSTGIGKKGQQPARKRLNFGQTGDSESVPDPQPIGEPPAAPSSVGSGTMAAGGGAPMADNNEGADGVGSSSGNWHCDSTWLGDRVITTSTRTWALPTYNNHLYKQISNGTSGGSTNDNTYFGYSTPWGYFDFNRFHCHFSPRDWQRLINNNWGFRPKRLSFKLFNIQVKEVTQNEGTKTIANNLTSTVQVFSDSEYQLPYVLGSAHQGCLPPFPADVFMIPQYGYLTLNNGSQSVGRSSFYCLEYFPSQMLRTGNNFTFSYTFEDVPFHSSYAHSQSLDRLMNPLIDQYLYYLARTQSNAGGTAGNRELQFYQGGPTTMAEQAKNWLPGPCFRQQRVSKTLDQNNNSNFAWTGATKYHLNGRNSLVNPGVAMATHKDDEERFFPSSGVLIFGKTGAANKTTLENVLMTNEEEIRPTNPVATEEYGTVSSNLQAANTAAQTQVVNNQGALPGMVWQNRDVYLQGPIWAKIPHTDGNFHPSPLMGGFGLKHPPPQILIKNTPVPANPPEVFTPAKFASFITQYSTGQVSVEIEWELQKENSKRWNPEIQYTSNFDKQTGVDFAVDSQGVYSEPRPIGTRYLTRNL

SEQ ID NO: 1298 - protein, 737 aa, synthetic construct
  REGION 1..737: note = Synthetic
MAADGYLPDWLEDNLSEGIREWWDLKPGAPKPKANQQKQDDGRGLVLPGYKYLGPFNGLDKGEPVNAADAAALEHDKAYDQQLKAGDNPYLRYNHADAEFQERLQEDTSFGGNLGRAVFQAKKRVLEPLGLVEEAAKTAPGKKRPVEPSPQRSPDSSTGIGKKGQQPARKRLNFGQTGDSESVPDPQPIGEPPAGPSGLGSGTMAAGGGAPMADNNEGADGVGNASGNWHCDSTWLGDRVITTSTRTWALPTYNNHLYKQISSQSAGSTNDNVYFGYSTPWGYFDFNRFHCHFSPRDWQRLINNNWGFRPKKLNFKLFNIQVKEVTTNDGVTTIANNLTSTVQVFSDSEYQLPYVLGSAHQGCLPPFPADVFMIPQYGYLTLNNGSQSVGRSSFYCLEYFPSQMLRTGNNFTISYTFEDVPFHSSYAHSQSLDRLMNPLIDQYLYYLARTQSNAGGTAGNQELQFYQGGPTTMAEQAKNWLPGPCFRQQRVSKTLDQNNNSNFAWTGATKYHLNGRNSLVNPGVAMATHKDDEERFFPSSGVLIFGKTGAANKTTLENVLMTNEEEIRPTNPVATEEYGTVSSNLQAANTAAQTQVVNNQGALPGMVWQNRDVYLQGPIWAKIPHTDGNFHPSPLMGGFGLKHPPPQILIKNTPVPADPPTAFNQAKLNSFITQYSTGQVSVEIEWELQKENSKRWNPEIQYTSNYYKSTNVDFAVNTEGVYSEPRPIGTRYLTRNL

SEQ ID NO: 1299 - protein, 735 aa, synthetic construct
  REGION 1..735: note = Synthetic
MAADGYLPDWLEDNLSEGIHEWWDPKPGAPKPKANQQKQDDGRGLVLPGYKYLGPFNGLDKGEPVNAADAAALEHDKAYDQQLKAGDNPYLRYNHADAEFQERLQEDTSFGGNLGRAVFQAKKRVLEPLGLVEEGAKTAPGKKRPVEPSPQRSPDSSTGIGKKGQQPARKRLNFGQTGDSESVPDPQPIGEPPAAPSSVGSGTMAAGGGAPMADNNEGADGVGSSSGNWHCDSTWLGDRVITTSTRTWALPTHNNHLYKQISNGTSGGSTNDNVYFGYSTPWGYFDFNRFHCHFSPRDRQRLINNNWGFRPKRLSFKLFNIQVKEVTQNEGTKTIANNLTSTIQVFTDSEYQLPYVLGSAHQGCLPPFPADVFMIPQYGYLTLNNGSQAVGRSSFYCLEYFPSQMLRTGNNFSFSYTFEDVPFHSSYAHSQSLDRLMNPLIDQYLYYLSRTQSTEGTAGTQQLLFSQAGPSNMSAQARNWLPGPCYRQQRVSTTLSQNNNSNFAWTGATKYHLNGRDSLVNPGVAMATHKDDEERFFPSSGVLIFGKTGAANKTTLENVLMTNEEEIRPTNPVATEEYGTVSSNLQAANTAAQTQVVNNQGALPGMVWQNRDVYLQGPIWAKIPHTDGNFHPSPLMGGFGLKHPQILIKNTPVPANPPEVFTPAKFASFITQYSTGQVSVEIEWELQKENSKRWNPEIQYTSNFDKQTGVDFAVDSQGVYSEPRPIGTRYLTRNL

SEQ ID NO: 1300 - protein, 736 aa, synthetic construct
  REGION 1..736: note = Synthetic
MAADGYLPDWLEDTLSEGIRQWWKLKPGPPPPKPAERHKDDSRGLVLPGYKYLGPGNGLDKGEPVNAADAAALEHDKAYDQQLKAGDNPYLKYNHADAEFQERLKEDTSFGGNLGRAVFQAKKRLLEPLGLVEEAAKTAPGKKRPVEQSPQEPDSSAGIGKSGSQPAKKKLNFGQTGDTESVPDPQPIGEPPAAPSGVGSLTMASGGGAPVADNNEGADGVGSSSGNWHCDSQWLGDRVITTSTRTWALPTYNNHLYKQISNSTSGGSSNDNAYFGYSTPWGYFDFNRFHCHFSPRDWQRLINNNWGFRPKRLNFKLFNIQVKEVTDNNGVKTIANNLTSTVQVFTDSDYQLPYVLGSAHEGCLPPFPADVFMIPQYGYLTLNDGGQAVGRSSFYCLEYFPSQMLRTGNNFQFSYEFENVPFHSSYAHSQSLDRLMNPLIDQYLYYLSKTINGSGQNQQTLKFSVAGPSNMAVQGRNYIPGPSYRQQRVSTTVTQNNNSEFAWPGASSWALNGRNSLMNPGPAMASHKEGEDRFFPLSGSLIFGKQGTGRDNVDADKVMITNEEEIKTTNPVATESYGQVATNHQSAQAQAQTGWVQNQGILPGMVWQDRDVYLQGPIWAKIPHTDGNFHPSPLMGGFGMKHPPPQILIKNTPVPADPPTAFNKDKLNSFITQYSTGQVSVEIEWELQKENSKRWNPEIQYTSNYYKSNNVEFAVSTEGVYSEPRPIGTRYLTRNL

SEQ ID NO: 1301 - protein, 736 aa, synthetic construct
  REGION 1..736: note = Synthetic
MAADGYLPDWLEDTLSEGIRQWWKLKPGPPPPKPAERHKDDSRGLVLPGYKYLGPGNGLDKGEPVNAADAAALEHDKAYDQQLKAGDNPYLKYNHADAEFQERLKEDTSFGGNLGRAVFQAKKRLLEPLGLVEEAAKTAPGKKRPVEQSPQEPDSSAGIGKSGSQPAKKKLNFGQTGDTESVPDPQPIGEPPAAPSGVGSLTMASGGGAPVADNNEGADGVGSSSGNWHCDSQWLGDRVITTSTRTWALPTYNNHLYKQISNSTSGGSSNDNAYFGYSTPWGYFDFNRFHCHFSPRDWQRLINNNWGFRPKRLNFKLFNIQVKEVTDNNGVKTIANNLTSTVQVFTDSDYQLPYVLGSAHEGCLPPFPADVFMIPQYGYLTLNDGSQAVGRSSFYCLEYFPSQMLRTGNNFQFSYEFENVPFHSSYAHSQSLDRLMNPLIDQYLYYLSKTINGSGQNQQTLKFSVAGPSNMAVQGRNYIPGPSYRQQRVSTTVTQNNNSEFAWPGASSWALNGRNSLMNPGPAMASHKEGEDRFFPLSGSLIFGKQGTGRDNVDADKVMITNEEEIKTTNPVATESYGQVATNHQSAQAQAQTGWVQNQGILPGMVWQDRDVYLQGPIWAKIPHTDGNFHPSPLMGGFGMKHPPPQILIKNTPVPADPPTAFNKDKLNSFITQYSTGQVSVEIEWELQKENSKRWNPEIQYTSNYYKSNNVEFAVNTEGVYSEPRPIGTRYLTRNL

SEQ ID NO: 1302 - protein, 735 aa, synthetic construct
  REGION 1..735: note = Synthetic
MAADGYLPDWLEDTLSEGIRQRWKLKPGPPPPEPAERHKDDSRGLVLPGYKYLGPFNGLDKGEPVNEADAAALEHDKAYDRQLDSGDNPYLKYNHADAEFQERLKEDTSFGGNLGRAVFQAKKRVLEPLGLVEEPVKTAPGKKRPVEHSPVEPDSSSGTGKAGQQPARKRLNFGQTGDADSVPDPQPLGQPPAAPSGLGTNTMATGSGAPMADNNEGADGVGNSSGNWHCDSTWMGDRVITTSTRTWALPTYNNHLYKQISSQSGASNDNHYFGYSTPWGYFDFNRFHCHFSPRDWQRLINNNWGFRPKRLNFKLFNIQVKEVTQNDGTTTIANNLTGTVQVFTDSEYQLPYVLGSAHQGCLPPFPADVFMVPQYGYLTLNNGSQAVGRSSFYCLEYFPSQMLRTGNNFTFSYTFEDVPFHSSYAHSQSLGRLMNPLIDQYLYYLSRTNTPSGTTTQSRLQFSQAGASDIRDQSRNWLPGPCYRQQRVSKTSADNNNSEYSWTGATKYHLNGRDSLVNPGPAMASHKDDEEKFFPQSGVLIFGKQGSEKTNVDIEKVMITDEEEIRTTNPVATEQYGSVSTNLQRGNRQAATADVNTQGVLPGMVWQDRDVYLQGPIWAKIPHTDGHFHPSPLMGGFGLKHPPPQILIKNTPVPANPSTTFSAAKFASFITQYSTGQVSVEIEWELQKENSKRWNPEIQYTSNYNKSVNVDFTVDTNGVYSEPRPIGTRYLTRNL

SEQ ID NO: 1303 - protein, 735 aa, synthetic construct
  REGION 1..735: note = Synthetic
MAADGYLPDWLEDTLSEGIRQRWKLKPGPPPPEPAERHKDDSRGLVLPGYKYLGPFNGLDKGEPVNEADAAALEHDKAYDRQLDSGDNPYLKYNHADAEFQERLKEDTSFGGNLGRAVFQAKKRVLEPLGLVEEPVKTAPGKKRPVEHSPVEPDSSSGTGKAGQQPARKRLNFGQTGDADSVPDPQPLGQPPAAPSGLGTNTMATGSGAPMADNNEGADGVGNSSGNWHCDSTWMGDRVITTSTRTWALPTYNNHLYKQISSQSGASNDNHYFGYSTPWGYFDFNRFHCHFSPRDWQRLINNNWGFRPKRLNFKLFNIQVKEVTQNDGTTTIANNLTSTVQVFTDSEYQLPYVLGSAHQGCLPPFPADVFMVPQYGYLTLNNESQAVGRSSFYCLEYFPSQMLRTGNNFTFSYTFEDVPFHSSYAHSQSLGRLMNPLIDQYLYYLSRTNTPSGTTTQSRLQFSQAGASDIRDQSRNWLPGPCYRQQRVSKTSADNNNSEYSWTGATKYHLNGRDSLVNPGPAMASHKDDEEKFFPQSGVLIFGKQGSEKTNVDIEKVMITDEEEIRTTNPVATEQYGSVSTNLQRGNRQAATADVNTQGVLPGMVWQDRDVYLQGPIWAKIPHTDGHFHPSPLMGGFGLKHPPPQILIKNTPVPANPSTTFSAAKFASFITQYSTGQVSVEIEWELQKENSKRWNPEIQYTSNYNKSVNVDFTVDTNGVYSEPRPIGTRYLTRNL

SEQ ID NO: 1304 - protein, 735 aa, synthetic construct
  REGION 1..735: note = Synthetic
MAADGYLPDWLEDTLSEGIRQRWKLKPGPPPPEPAERHKDDSRGLVLPGYKYLGPFNGLDKGEPVNEADAAALEHDKAYDRQLDSGDNPYLKYNHADAEFQERLKEDTSFGGNLGRAVFQAKKRVLEPLGLVEEPVKTAPGKKRPVEHSPVEPDSSSGTGKAGQQPARKRLNFGQTGDADSVPDPQPLGQPPAAPSGLGTNTMATGSGAPMADNNEGADGVGNSSGNWHCDSTWMGDRVITTSTRTWALPTYNNHLYKQISSQSGASNDNHYFGYSTPWGYFDFNRFHCHFSPRDWQRLINNNWGFRPKRLNFKLFNIQVKEVTQNDGTTTIANNLTSTVQVFTDSEYQLPYVLGSAHQGCLPPFPADVFMVPQYGYLTLNNGSQAAGRSSFYCLEYFPSQMLRTGNNFTFSYTFEDVPFHSSYAHSQSLGRLMNPLIDQYLYYLSRTNTPSGTTTQSRLQFSQAGASDIRDQSRNWLPGPCYRQQRVSKTSADNNNSEYSWTGATKYHLNGRDSLVNPGPAMASHKDDEEKFFPQSGVLIFGKQGSEKTNVDIEKVMITDEEEIRTTNPVATEQYGSVSTNLQRGNRQAATADVNTQGVLPGMVWQDRDVYLQGPIWAKIPHTDGHFHPSPLMGGFGLKHPPPQILIKNTPVPANPSTTFSAAKFASFITQYSTGQVSVEIEWELQKENSKRWNPEIQYTSNYNKSVNVDFTVDTNGVYSEPRPIGTRYLTRNL

SEQ ID NO: 1305 - protein, 735 aa, synthetic construct
  REGION 1..735: note = Synthetic
MAADGYLPDWLEDTLSEGIRQWWKLKPGPPPPKPAERHRDDSRGLVLPGYKYLGPFNGLDKGEPVNEADAAALEHDKAYDRQLDSGDNPYLKYNHADAEFQERLKEDTSFGGNLGRAVFQAKKRVLEPLGLVEEPVKTAPGKKRPVEHSPVEPDSSSGTGKAGQQPARKRLNFGQTGDADSVPDPQPLGQPPAAPSGLGTNTMATGSGAPMADNNEGADGVGNSSGNWHCDSTWMGDRVITTSTRTWALPTYNNHLYKQISSQSGASNDNHYFGYSTPWGYFDFNRFHCHFSPRDWQRLINNNWGFRPKRLNFKLFNIQVKEVTQNDGTTTIANNLTSTVQVFTDSGYQLPYVLGSAHQGCLPPFPADVFMVPQYGYPTLNNGSQAVGRSSFYCLEYFPSQMLRTGNNFTFSYTFEDVPFHSSYAHSQSLDRLMNPLIDQYLYYLSTTNTPSGTTTQSRLQFSQAGASDIRDQSRNWLPGPCYRQQRVSKTSADNNNSEYSWTGATKYHLNGRDSLVNPGPAVASHKDDEEKFFPQSGVLIFGKQGSEKTNVDIEKVMITDEEEIRTTNPVATEQYGSVSTNLQRGNRQAATADVNTQGVLPGMVWQDRDVYLQGPIWAKIPHTDGHFHPSPLMGGFGLKHPPPQILIKNTPVPANPSTTFSAAKFASFITQYSTGQVSVEIEWELQKENSKRWNPEIQYTSNYNKSVNVDFTVDTNGVYSEPRPIGTRYLTRNL

SEQ ID NO: 1306 - protein, 735 aa, synthetic construct
  REGION 1..735: note = Synthetic
MAADGYLPDWLEDTLSEGIRQWWKLKPGPPPPKPAERHRDDSRGLVLPGYKYLGPFNGLDKGEPVNEADAAALEHDKAYDRQLDSGDNPYLKYNHADAEFQERLKEDTSFGGNLGRAVFQAKKRVLEPLGLVGEPVKTAPGKKRPVEHSPVEPDSSSGTGKAGQQPARKRLNFGQTGDADSVPDPQPLGQPPAAPSGLGTNTMATGSGAPMADNNEGADGVGNSSGNWHCDSTWMGDRVITTSTRTWALPTYNNHLYKQISSQSGASNDSHYFGYSTPWGYFDFNRFHCHFSPRDWQRLINNNWGFRPKRLNFKLFNIQVKEVTQNDGTTTIANNLTSTVQVFTDSEYQLPYVLGSAHQGCLPPFPADVFMVPQYGYLTLNNGSQAVGRSSFYCLEYFPSQMLRTGNNFTFSYTFEDVPFHSSYAHSQSLDRLMNPLIDQYLYYLSTTNTPSGTTTQSRLQFSQAGASDIRDQSRNWLPGPCYRQQRVSKTSADNNNSEYSWTGATKYHLNGRDSLVNPGPAMASHKDNEEKFFPQSGVLIFGKQGSEKTNVDIEKVMITDEEEIRTTNPVATEQYGSVSTNLQRGNRQAATADVNTQGVLPGMVWQDRDVYLQGPIWAKIPHTDGHFHPSPLMGGFGLKHPPPQILIKNTPVPANPSTTFSAAKFASFITQYSTGQVSVEIEWELQKENSKRWNPEIQYTSNYNKSVNVDFTVDTNGVYSEPRPIGTRYLTRNL

SEQ ID NO: 1307 - protein, 735 aa, synthetic construct
  REGION 1..735: note = Synthetic
MAADGYLPDWLEDTLSEGIRQWWKLKPGPPPPKPAERHKDDSRGLVLPGYKYLGPFNGLDKGEPVNEADAAALEHDKAYDRQLDSGDNPYLKYNHADAEFQERLKEDTSFGGNLGRAVFQAKKRVLEPLGLVEEPVKTAPGKKRPVEHSPAEPDSSSGTGKAGQQPARKRLNFGQTGDADSVPDPQPLGQPPAAPSGLGTNTMASGSGAPMADNNEGADGVGNSSGNWHCDSTWMGDRVITTSTRTWALPTYNNHLYKQISSQSGASNDNHYFGYSTPWGYFDFNRFHCHFSPRDWQRLINNNWGFRPKRLNFKLFNIQVKEVTQNDGTTTIANNLTSTVQVFTDSEYQLPYVLGSAHQGCLPPFPADVFMVPQYGYLTLNNGSQAVGRSSFYCLEYFPSQMLRTGNNFTFSYTFEDVPFHSSYAHSQSLDRLMNPLIDQYLYYLSRTNTPSGTTTQSRLQFSQAGASDIRDQSRNWLPGPCYRQQRVSKTSADNNNSEYSWTGATKYHLNGRDSLVNPGPAMASHKDDEEKFFPQSGVLIFGKQGSEKTNVDIEKVMITDEEEIRTTNPVATEQYGSVSTNLQGGNTQAATADVNTQGVLPGMVWQDRDVYLQGPIWAKIPHTDGHFHPSPLMGGFGLKHPPPQILIKNTPVPANPSTTFSAAKFASFITQYSTGQVSVEIEWELQKENSKRWNPEIQYTSNYNKSVNVDFTVDTNGVYSEPRPIGTRYLTRNL

SEQ ID NO: 1308 - protein, 735 aa, synthetic construct
  REGION 1..735: note = Synthetic
MAADGYLPDWLEDTLSEGIRQWWKLKPGPPPPKPAERHKDDSRGLVLPGYKYLGPFNGLDKGEPVNEADAAALEHDKAYDRQLDSGDNPYLKYNHADAEFQERLKEDTSFGGNLGRAVFQAKKRVLEPLSLVEEPVKTAPGKKRPVEHSPAEPDSSSGTGKSGNQPARKRLNFGQTGDSDSVPDPQPLGQPPAAPSGLGTNTMATGSGAPMADNNEGADGVGNSSGNWHCDSTWMGDRVITTSTRTWALPTYNNHLYKQISSQSGASNDNHYFGYSTPWGYFDFNRFHCHFSPRDWQRLINNNWGFRPKRLNFKLFNIQVKEVTQNDGTTTIANNLTSTVQVFTDSEYQLPYVLGSAHQGCLPPFPADVFMVPQYGYLTLNNGSQAVGRSSFYCLEYFPSQMLRTGNNFTFSYTFEDVPFHSSYAHSQSLDRLMNPLIDQYLYYLSRTNTPSGTTTQSRLQFSQAGASDIQDQSRNWLPGPCYRQQRVSKTSADNNNSEYSWTGATKYHLNGRDSLVNPGPAMASHKDDEEKFFPQSGVLIFGKQGSEKTNVDIEKVMITDEEEIRTTNPVATEQYGSVSTNLQSGNTQAATADVNTQGVLPGMVGQDRDVYLQGPTWAKIPHTDGHFHPSPLMGGFGLKHPPPQILIKNTPVPANPSTTFSAAKFASFITQYSTGQVSVEIEWELQKENSKRWNPEIQYTSNYNKSVNVDFTVDTNGVYSEPRPIGTRYLTRNL

SEQ ID NO: 1309 - protein, 735 aa, synthetic construct
  REGION 1..735: note = Synthetic
MAADGYLPDWLEDTLSEGIRQWWKLKPGPPPPKPAERHKDDSRGLVLPGYKYLGPFNGLDKGEPVNEADAAALEHDKAYDRQLDSGDNPYLKYNHADAEFQERLKEDTSFGGNLGRAVFQAKKRVLEPLGLVEEPVKTAPGKKRPVEHSPAEPDSSSGTGKSGNQPARKRLNFGQTGDSDSVPDPQPLGQPPAAPSGLGTNTMATGSGAPMADNNEGADGVGNSSGNWHCDSTWMGDRVITTSTRTWALPTYNNHLYKQISSQSGASNDNHYFGYSTPWGYFDFNRFHCHFSPRDWQRLINNNWGFRPKRLNFKLFNIQVKEVTQNDGTTTIANNLTSTVQVFTDSEYQLPYVLGSAHQGCLPPFPADVFMVPQYGYLTLNNGSQAVGRSSFYCLEYFPSQMLRTGNSFTFSYTFEDVPFHSSYAHSQSLDRLMNPLIDQYLYYLSRTNTPSGTTTQSRLQFSQAGASDIRDQSRNWLPGPCYRQQRVSKTSADNNNSEYSWTGATKYHLNGRDSLVNPGPAMASHKDDEEKFFPQSGVLIFGKQGSEKTNVDIEKVMITDEEEIRTTNPVATEQYGSVSTNLQSGNTQAATADVNTQGVLPGMVWQDRDVYLQGPIWAKIPHTDGHFHPSPLMGGFGLKHPPPQILIKNTPVPANPSTTFSAAKFASFITQYSTGQVSVEIEWELQKENSKRWNPEIQYTSNYNKSVNVDFTVDTNGVYSEPRPIGTRYLTRNL

SEQ ID NO: 1310 - protein, 735 aa, synthetic construct
  REGION 1..735: note = Synthetic
MAADGYLPDWLEDTLSEGIRQWWKLKPGPPPPKPAERHKDDSRGLVLPGYKYLGPFNGLDKGEPVNEADAAALEHDKAYDRQLDSGDNPYLKYNHADAEFQERLKEDTSFGGNLGRAVFQAKKRVLEPLGLVEEPVKTAPGKKRPVEHSPAEPDSSSGTGKSGNQPARKRLNFGQTGDSDSVPDPQPLGQPPAAPSGLGTNTMATGSGAPMADNNEGADGVGNSSGNWHCDSTWMGDRVITTSTRTWALPTYNNHLYKQISSQSGASNDNHYFGYSTPWGYFDFNRFHCHFSPRDWQRLINNNWGFRPKRLNFKLFNIQVKEVTQNDGTTTIANNLTSTVQVFTDSEYQLPYVLGSAHQGCLPPFPADVFMVPQYGYLTLNNGSQAVGRSSFYCLGYFPSQMLRTGNNFTFSYTFEDVPFHSSYAHSQSLDRLMNPLIDQYLYYLSRTNTPSGTTTQSRLQFSQAGASDIRDQSRNWLPGPCYRQQRVSKTSADNNNSEYSWTGATKYHLNGRDSLVNPGPAMASHKDDEEKFFPQSGVLIFGKQGPEKTNVDIEKVMITDEEEIRTTNPVATEQYGSVSTNLQSGNTQAATADVNTQGVLPGMVWQDRDVYLQGPIWAKIPHTDGHFHPSPLMGGFGLKHPPPQILIKNTPVPANPSTTFSAAKFASFITQYSTGQVSVEIEWELQKENSKRWNPEIQYTSNYNKSVNVDFTVDTNGVYSEPRPIGTRYLTRNL

SEQ ID NO: 1311 - protein, 735 aa, synthetic construct
  REGION 1..735: note = Synthetic
MAADGYLPDWLEDTLSEGIRQWWKLKPGPPPPKPAERHKDDSRGLVLPGYKYLGPFNGLDKGEPVNEADAAALEHDKAYDRQLDSGDNPYLKYNHADAEFQERLKEDTSFGGNLGRAVFQAKKRILEPLGLVEEPVKTAPGEKRPVEHSPAEPDSSSGTGKAGQQPARKRLNFGQTGDADSVPDPQPLGQPPAAPSGLGTNTMASGSGAPMADNNEGADGVGNSSGNWYCDSTWMGDRVITTSTRTWALPTYNNHLYKQISSQSGASNDNHYFGYSTPWGYFDFNRFHCHFSPRDWQRLINNNWGFRPKRLSFKLFNIQVKEVTQNDGTTTIANNLTSTVQVFTDSEYQLPYVLGSAHQGCLPPFPADVFMVPQYGYLTLNNGSQAVGRSSFYCLEYFPSQMLRTGNNFTFSYTFEDVPFHSSYAHSQSLDRLMNPLIDQYLYYLSRTNTPSGTTTMSRLQFSQAGASDIRDQSRNWLPGPCYRQQRVSKTAADNNNSDYSWTGATKYHLNGRDSLVNPGPAMASHKDDEEKYFPQSGVLIFGKQDSGKTNVDIEKVMITDEEEIRTTNPVATEQYGSVSTNLQSGNTQAATSDVNTQGVLPGMVWQDRDVYLQGPIWAKIPHTDGHFHPSPLVGGFGLKHPPPQILIKNTPVPANPSTTFSAAKFASFITQYSTGQVSVEIEWELQKENSKRWNPEIQYTSNYNKSVNVDFTVDTNGVYSEPRPIGTRYLTRNL

SEQ ID NO: 1312 - protein, 735 aa, synthetic construct
  REGION 1..735: note = Synthetic
MAADGYLPDWLEDTLSEGIRQWWKLKPGPPPPKPAERHKDDSRGLVLPGYRYLGPFNGLDKGEPVNEADAAALEHDKAYDRQLDSGDNPYLKYNHVDAEFQERLKEDTSFGGNLGRAVFQAKKRILEPLGLVEEPVKAAPGEKRPVEHSPAEPDSSSGTGKAGQQPARKRLNFGQTGDADSVPDPQPLGQPPAAPSGLGTNTMASGSGAPMADNNEGADGVGNSSGNWHCDSTWMGDRVITTSTRTWALPTYNNHLYKQISSQSGASNDNHYFGYSTPWGHFDFNRFHCHFSPRDWQRLINNNWGFRPKRLSFKLFNIQVKEVTQNDGTTTIANNLTSTVQVFTDSEYQLPYVLGSAHQGCLPPFPADVFMVPQYGYLTLNNGSQAVGRSSFYCLEYFPSQMLRTGNNFTFSYTFEDVPFHSSYAHSQSLDRLMNPLIDQYLYYLSRTNTPSGTTTMSRLQFSQAGASDIRDQSRNWLPGPCYRQQRVSKTAADNNNSDYSWTGATKYHLNGRDSLVNPGPAMASHKDDEEKYFPQSGVLIFGKQDSGKTNVDIEKVMITDEEEIRTTNPVATEQYGSVSTNLQSGNTQAATSDVNTQGVLPGMVWQDRDVYLQGPIWAKIPHTDGHFHPSPPMGGFGLKHPPPQILIKNTPVPANPSTTFSAAKFASFITQYSTGQVSVEIEWELQKENSKRWNPEIQYTSNYNKSVNVDFTVDTNGVYSEPRPIGARYLTRNL

SEQ ID NO: 1313 - protein, 735 aa, synthetic construct
  REGION 1..735: note = Synthetic
MAADGYLPDWLEDTLSEGIRQWWKLKPGPPPPKPAERHKDDSRGLVLPGYKYLGPFNGLDKGEPVNEADAAALEHDKAYDRQLDSGDNPYLKYNHADAEFQERLKEDTSFGGNLGRAVFQAKKRILEPLGLVEEPVKTAPGKKRPVEHSPAEPDSSSGTGKAGQQPARKRLNFGQTGDADSVPDPRPLGQPPAAPSGLGTNTMASGSGAPMADNNEGADGVGNSSGNWHCDSTWMGDRVITTSTRTWALPTYNNHLYKQISSQSGASNDNHYFGYSTPWGYFDFNRFHCHFSPRDWQRLINNNWGFRPKRLSFKLFNIQVKEVTQNDGTTTIANNLTSTVQVFTDSEYQLPYVLGSAHQGCLPPFPADVFMVPQYGYLTLNNGSQAVGRSSFYCLEYFPSQMLRTGNNFTFSYTFEDVPFHSSYAHSQSLDRLMNPLIDQYLYYLSRTNTPSGTTTMSRLQFSQAGASDIRDQSRNWLPGPCYRQQRVSKTAADNNNSDYSWTGATKYHLNGRDSLVNPGPAMASHKDDEEKYFPQSGVLIFGKQDSGKTNVDIEKVMITDEEEIRTTNPVATEQYGSVSTNLQSGNTQAATSDVNTQGVLPGMVWQDRDVYLQGPIWAKIPHTDGHFHPSPLMGGFGLKHPPPQILIKNTPVPANPSTTFSAAKFASFITQYSTGQVSVEIEWELQKENSKRWNPEIQYTSNYNKSVNVDFTVDTNGVYSEPRPIGTRYLTRNL

SEQ ID NO: 1314 - protein, 735 aa, synthetic construct; identical to SEQ ID NO: 1313
  REGION 1..735: note = Synthetic

SEQ ID NO: 1315 - protein, 735 aa, synthetic construct
  REGION 1..735: note = Synthetic
MAADGYLPDWLEDTLSEGIRQWWKLKPGPPPPKPAERHKDDSRGLVLPGYKYLGPFNGLDKGEPVNEADAAALEHDKAYDRQLDSGDNPYLKYNHADAEFQERLKEDTSFGGNLGRAVFQAKKRILEPLGLVEEPVKTAPGKKRPVEHSPAEPDSSSGTGKAGQQPARKRLNFGQTGDADSVPDPQPLGQPPAAPSGLGTNTMASGSGAPMADNNEGADGVGNSSGNWHCDSTWMGDRVITTSTRTWALPTCNNHLYKQISSQSGASNDNHYFGYSTPWGYFDFNRFHCHFSPRDWQRLINNNWGFRPKRLSFKLFNIQVKEVTQNDGTTTIANNLTSTVQVFTDSEYQLPYVLGSAHQGCLPPFPADVFMVPQYGYLTLNNGSQAVGRSSFYCLEYFPSQMLRTGNNFTFSYTFEDVPFHSSYAHSQSLDRLMNPLIDQYLYYLSRTNTPSGTTTMSRLQFSQAGASDIRDQSRNWLPGPCYRQQRVSKTAADNNNSDYSWTGATKYHLNGRDSLVNPGPAMASHKDDEEKYFPQSGVLIFGKQDSGKTNVDIEKVMITDEEEIRTTNPVATEQYGSVSTYLQSGNTQAATSDVNTQGVLPGMVWQDRDVYLRGPIWAKIPHTDGHFHPSPLMGGFGLKHPPPQILIKNTPVPANPSTTFSAAKFASFITQYSTGQVSVEIEWELQKENSKRWNPEIQYTSNYNKSVNVDFTVDTNGVYSEPRPIGTRYLTRNL

SEQ ID NO: 1316 - protein, 735 aa, synthetic construct
  REGION 1..735: note = Synthetic
MAADGYLPDWLEDTLSEGIRQWWKLKPGPPPPKPAERHKDDSRGLVLPGYKYLGPFNGLDKGEPVNEADAAALEHDKAYDRQLDSGDNPYLKYNHADAEFQERLKGDTSFGGNLGRAVFQAKKRILEPLGLVEEPVKTAPGKKRPVEHSPAEPDSSSGTGKAGQQPARKRLNFGQTGDADSVPDPQPLGQPPAAPSGLGTNTMASGSGAPMADNNEGADGVGNSSGNWHCDSTWMGGRVITTSTRTWALPTYNNHLYKQISSQSGASNDNHYFGYSTPWGYFDFNRFHCHFSPRDWQRLINNNWGFRPKRLSFKLFNIQVKEVTQNDGTTTIANNLTSTVQVFTDSEYQLPYVLGSAHQGCLPPFPADVFMVPQYGYLTLNNGSQAVGRSSFYCLEYFPSQTLRTGNNFTFSYTFEDVPFHSSYAHSQSLDRLMNPLIDQYLYYLSRTNTPSGTTTMSRLQFSQAGASDIRDQSRNWLPGPCYRQQRVSKTAADNNNSDYSWTGATKYHLNGRDSLVNPGPAMASHKDDEEKYFPQSGVLIFGKQDSGKTNVDIEKVMITDEEEIRTTNPVATEQYGSVSTNLQSGNTQAATSDVNTQGVLPGMVWQDRDVYLQGPIWAKIPHTDGHFHPSPLMGGFGLKHPPPQILIKNTPVPANPSTTFSAAKFASFITQYSTGQVSVEIEWELQKENSKRWNPEIQYTSNYNKSVNVDFTVDTNGVYSEPRPIGTRYLTRNL

SEQ ID NO: 1317 - protein, 735 aa, synthetic construct
  REGION 1..735: note = Synthetic
MAADGYLPDWLEDTLSEGIRQWWKLKPGPPPPKPAERHKDDSRGLVLPGYKYLGPFNGLDKGEPVNEADAAALEHDKAYDRQLDSGDNPYLKYNHADAEFQERLKEDTSFGGNLGRAVFQAKKRILEPLGLVEEPVKTAPGKKRPVEHSPAEPDSSSGTGKAGQQPARKRLNFGQTGDADSVPDPQPLGQPPAAPSGLGTNTMASGSGAPMADNNEGADGVGNSSGNWHCDSTWMGDRVITTSTRTWALPTYNNHLYKQISSQSGASNDNHYFGYSTPWGYFDFNRFHCHFSPRDWQRLINNNWGFRPKRLSFKLFNIQVKEVTQNDGTTTIANNLTSTVQVFTDSEYQLPYVLGSAHQGCLPPFPADVFMVPQYGYLTLNNGSQAVGRSSFYCLEYFPSQMLRTGNNFTFSYTFEDVPFHSSYAHSQSLDRLMNPLIDQYLYYLSRTNTPSGTTTMSRLQFSQAGASDIRDQSRNWLPGPCYRQQRVSKTAADNNNSDYSWTGATKYHLNGRDSLVNPGPAMASHKDDEEKYFPQSGVLIFGKQDSGKTNVDIEKVMITDEEEIRTTNPVATEQYGSVSTNLQSGNTQAATSDVNTQGVLPGMVWQDRDVYLQGPIWAKIPHTDGHFHPSPLMGGFGLKHPPPQILIKNTPVPANPSTTFSAAKFASFITQYSTGQVSVEIEWELQKENSKRWNPEIQYTSNYNKSVNVDFTVDTNGVYSEPRPIGTRYLTRNL

SEQ ID NO: 1318 - protein, 735 aa, synthetic construct
  REGION 1..735: note = Synthetic
MAADGYLPDWLEDTLSEGIRQWWKLKPGPPPPKPAERHKDDSRGLVLPGYKYLGPFNGLDKGEPVNEADAAALEHDKAYDRQLDSGDNPYLKYNHADAEFQERLKEDTSFGGNLGRAVFQAKKRILEPLGLVEEPVKTAPGKKRPVEHSPAEPDSSSGTGKAGQQPARKRLNFGQTGDADSVPDPQPLGQPPAAPSGLGTNTMASGSGAPMADNNEGADGVGNSSGNWHCDSTWMGDRVITTSTRTWALPTYNNHLYKQISSQSGASNDNHYFGYSTPWGYFDFNRFHCHFSPRDWQRLINNNWGFRPKRLSFKLFNIQVKEVTQNDGTTTIANNLTSTVQVFTDSGYQLPYVLGSAHQGCLPPFPADVFMVPQYGYLTLNNGSQAVGRSSFYCLEYFPSQMLRTGNNFTFSYTFEDVPFHSSYAHGQSLDRLMNPLIDQYLYYLSRTNTPSGTTTMSRLQFSQAGASDVRDQSRNWLPGPCYRQQRVSKTAADNNNSDYSWTGATKYHLNGRDSLVNPGPAMASHKDDEEKYFPQSGVLVFGKQDSGKTNVDIEKVMITDEEEIRTTNPAATEQYGSVSTNLQSGNTQAATSDVNTQGVLPGMVWQDRDVYLQGPIWAKIPHTDGHFHPSPLMGGFGLKHPPPQILIKNTPVPANPSTTFSAAKFVSFITQYSTGQVSVEIEWELQKENSKRWNPEIQYTSNYNKSVNVDFTVDTNGVYSEPRPIGTRYLTRNL

SEQ ID NO: 1319 - protein, 735 aa, synthetic construct
  REGION 1..735: note = Synthetic
MAADGYLPDWLEDTLSEGIRQWWKLKPGPPPPKPAERHKDDSRGLVLPGYKYLGPFNGLDKGEPVNEADAAALEHDKAYDRQLDSGDNPYLKYNHADAEFQERLKEDTSFGGNLGRAVFQAKKRVLEPLGLVEEPVKTAPGKKRPVEHSPVEPDSSSGTGKAGQQPARKRLNFGQTGDADSVPDPQPLGQPPAAPSGLGSTTMATGSGAPMADNNEGADGVGNSSGNWHCDSQWLGDRVITTSTRTWALPTYNNHLYKQISSQSGASNDNHYFGYSTPWGYFDFNRFHCHFSPRDWQRLVNNNRGFRPKRLNFKLFNIQVKEVTQNDGTTTIANNLTSTVQVFTDSEYQLPYVLGSAHQGCLPPFPADVFMVPQYGYLTLNNGSQAVGRSSFYCLEYFPSQMLRTGNNFQFSYTFEDVPFHSSYAHSQSLDRLMNPLIDQYLYYLNKTQTNSGTLQQSRLLFSQAGPTNMSLQAKNWLPGPCYRQQRLSKQANDNNNSNFPWTAATKYHLNGRDSLVNPGPAMASHKDDEEKFFPMHGTLIFGKQGTNANDADLENVMITDEEEIRATNPVATEQYGTVSNNLQNSNTGPTTGTVNHQGALPGMVWQDRDVYLQGPIWAKIPHTDGHFHPSPLMGGFGLKHPPPQIMIKNTPVPANPPTNFSSAKFASFITQYSTGQVSVEIEWELQKENSKRWNPEIQYTSNYNKSVNVDFTVDTNGVYSEPRPIGTRYLTRNL

SEQ ID NO: 1320 - protein, 735 aa, synthetic construct
  REGION 1..735: note = Synthetic
MAADGYLPDWLEDTLSEGIRQWWKLKPGPPPPKPAERHKDDSRGLVLPGYKYLGPFNGLDKGEPVNEADAAALEHDKAYDRQLDSGDNPYLKYNHADAEFQERLKEDTSFGGNLGRAVFQAKKRVLEPLGLVEEPVKTAPGKKRPVEHSPVEPDSSSGTGKAGQQPARKRLNFGQTGDADSVPDPQPLGQPPAAPSGLGSTTMATGSGAPMADNNEGADGVGNSSGNWHCDSQWLGDRVITTSTRTWALPTYNNHLYKQISSQSGASNDNHYFGYSTPWGYFDFNRFHCHFSPRDWQRLINNNWGFRPKRLNFKLFNIQVKEVTQNDGTTTIANNLTSTVQVFTDSEYQLPYVLGSAHQGCLPPFPADVFMVPQYGYLTLNNGSQAVGRSSFYCLEYFPSQMLRTGNNFQFSYTFEDVPFHSSYAHSQSLDRLMNPLIDQYLYYLNKTQTNSGTLQQSRLLFSQAGPTNMSLQAKNWLPGPCYRQQRLSKQANDNNNSNFPWTAATKYHLNGRDSLVNPGPAMASRKDDEEKFFPMHGTLIFGKQGTNANDADLENVMITDEEEIRATNPVATEQYGTVSNNLQNSNTGPTTGTVNHQGALPGMVWQDRDVYLQGPIWAKIPHTDGHFHPSPLMGGFGLKHPPPQIMIKNTPVPANPPTNFSSAKFASFITQYSTGQVSVEIEWELQKENSKRWNPEIQYTSNYNKSVNVDFTVDTNGVYSEPRPIGTRYLTRNL

SEQ ID NO: 1321 - protein, 735 aa, synthetic construct
  REGION 1..735: note = Synthetic
MAADGYPPDWLEDTLSEGIRQWWKLKPGPPPPKPAERHKDDSRGLVLPGYKYLGPFNGLDKGEPVNEADAAALEHDKAYDRQLDSGDNPYLKYNHADAEFQERLKEDTSFGGNLGRAVFQAKKRVLEPLGLVEEPVKTAPGKKRPVEHSPVEPDSSSGTGKAGQRPARKRLNFGQTGDADSVPDPQPLGQPPAAPSGLGSTTMATGSGAPMADNNEGADGVGNSSGNWHCDSQWLGDRVITTSTRTWALPTYNNHLYKQISSQSGASNDNHYFGYSTPWGYFDFNRFHCHFSPRDWQRLINNNWGFRPKRLNFKLFNIQVKEVTQNDGTTTIANNLTSTVQVFTDSEYQLPYVLGSAHQGCLPPFPADVFMVPQYGYLTLNNGSQAVGRSSFYCLEYFPSQMLRTGNNFQFSYTFEDVPFHSSYAHSQSLDRLMNPLIDQYLYYLNKTQTNSGTLQQSRLLFSQAGPTNMSLQAKNWLPGPCYRQQRLSKQANDNNNSNFPWTAATKYHLNGRDSLVNPGPAMASHKDDEEKFFPMHGTLIFGKQGTNANDADLENVMITDEEEIRATNPVATEQYGTVSNNLQNSNTGPTTGTVNRQGALPGMVWQDRDVYLQGPIWAKIPHTDGHFHPSPLMGGFGLKHPPPQIMIKNTPVPANPPTNFSSAKFASFITQYSTGQVSVEIEWELQKENSKRWNPEIQYTSNYNKSVNVDFTVDTNGVYSEPRPIGTRYLTRNL

SEQ ID NO: 1322 - protein, 735 aa, synthetic construct
  REGION 1..735: note = Synthetic
MAADGYLPDWLEDTLSEGIRQWWKLKPGPPPPKPAERHKDDSRGLVLPGYKYLGPFNGLDKGEPVNEADAAALEHDKAYDRQLDSGDNPYLKYNHADAEFQERLKEDTSFGGNLGRAVFQAKKRVLEPLGLVEEPVKTAPGKKRPVEHSPVEPDSSSGTGKAGQQPARKRLNFGQTGDADSVPDPQPLGQPPAAPSGLGSTTMATGSGAPMADNNEGADGVGNSSGNWHCDSQWLGDRVITTSTRTWALPTYNNHLYKQISSQSGASNDNHYFGYSTPWGYFDFNRFHCHFSPRDWQRLINNNWGFRPKRLNFKLFNIQVKEVTQNGGTTTIANNLTSTVQVFTDSEYQLPYVLGSAHQGCLPPFPADVFMVPQYGYLTLNNGSQAVGRSSFYCLEYFPSQMLRTGNNFQFSYTFEDVPFHSSYAHSQSLDRLMNPLIDQYLYYLNKTQTNSGTLQQSRLLFSQAGPTNMSLQAKNWLPGPCYRQQRLSKQANGNNNSNFPWTAATKYHLNGRDSLVNPGPAMASHKDDEEKFFPMHGTLIFGKQGTNANDADLENVMITDEEEIRATNPVATEQYGTVSNNLQNSNTGPTTGTVNHQGALPGMVWQDRDVYLQGPIWAKIPHTDGHFHPSPLTGGFGLKHPPPQIMIKNTPVPANPPTNFSSAKFASFITQYSTGQVSVEIEWELQKENSKRWNPEIQYTSNYNKSVNVDFTVDTNGVYSEPRPIGTRYLTRNL

SEQ ID NO: 1323 - protein, 736 aa, synthetic construct
  REGION 1..736: note = Synthetic
MAADGYLPDWLEDTLSEGIRQWWKLKPGPPPPKPAERHKDDSRGLVLPGYKYLGPFNGLDKGEPVNEADAAALEHDKAYDRQLDSGDNPYLKYNHADAEFQERLKEDTSFGGNLGRAVFQAKKRVLEPLRPGLRKPVKTAPGKKRPVEHSPVEPDSSSGTGKAGQQPARKRLNFGQTGDADSVPDPQPLGQPPAAPSGLGSTTMATGSGAPMADNNEGADGVGNSSGNWHCDSQWLDDRVIATSTRTWALPTYNNHLYKQISSQSGACNDNHYFGYSTPWGYFDFNRFHCHFSPRDWQRLINSNWGFRPKRLNFKLFNIQVKEVTQNDGTTTIANNLTSTVQVFTDSEYQLPYVPGSAHQGCLPPFPADVFMVPQYGYLTLNNGSQAVGRSSFYCLEYFPSQMLRTGNNFQFSYTFEDVPFHSSYAHCQSLDRLMNPLIDQYLYYLNKTQTNSGTLQQSRLLFSQAGPTNMSLQAKNWLPGPCYRQQRLSKQANDNNNCNFPWTAATKYHLNGRDSLVNPGPAMASHKDDEEKFFPMHGTLIFGKQGTNANDADLENVMITDEEEIRPTNPVATEQYGTVSNNLQNSNTGPTTGTVNHQGALPGMVWQDRDVYLQGPIWAKIPHTDGHFHPSPLMGGFGLKHPPPQIMIKSTPVPANPPTNFSSAKFASSITQYSTGQVSVEIEWELQKENSKRWNPEIQYTSNYNKSVNVDFTVDTNGVYSEPRPIGTRYLTRNL

SEQ ID NO: 1324 - protein, 735 aa, synthetic construct
  REGION 1..735: note = Synthetic
MAADGYLPDWLEDTLSEGIRQWWKLKPGPPPPKPAERHKDGSRGLVLPGYKYLGPFNGLDKGEPVNEADAAALEHDKAYDRQLNSGDNPYLKYNHADAEFQERLKEDTSFGGNLGRAVFQAKKRVLEPLGLVEEPVKTAPGKKRPVEHSPAEPDSSSGTGKAGQQPARKRLNFGQTGDADSVPDPQPLGQPPAAPSGLGSTTMATGSGAPMADNNEGADGVGNSSGNWHCDSQWLGDRVITTSTRTWALPTYNNHLYKQISSQSGASNDNHYFGYSTPWGYFDFNRFHCHFSPRDWQRLINNNWGFRPKRLNFKLFNIQVKEVTQNDGTTTIANNLTSTVQVFTDSEYQLPYVLGSAHQGCLPPFPADVFMVPQYGYLTLNNGSQAVGRSPFYCLEYFPSQMLRTGNNFQFSYTFEDVPFHSSYAHSQSLDRLMNPLIDQYLYYLNKTQTNSGTLQQSRLLFSQAGPTNMSLQAKNWLPGPCYRQQRLSKQANDNNNSNFPWTAATKYHLNGRDSLVNPGPAMASHKDDEEKFFPMHGTLIFGKQGTNANDADLENVMITDEEEIRTTNPVATEQYGTVSNNLQNSNTGPTTGTVNHQGALPGMVWQDRDVYLQGPIWAKIPHTDGHFHPSPLMGGFGLKHPPPQIMIKNTPVPANPPTNFSSAKFASFITQYSTGQVSVEIEWELQKENSKRWNPEIQYTSNYNKSVNVDFTVDNNGVYSEPRPIGTRYLTRNL

SEQ ID NO: 1325 - protein, 735 aa, synthetic construct
  REGION 1..735: note = Synthetic
MAADGYLPDWLEDTLSEGIRQWWKLKPGPPPPKPAERHKDDSRGLVLPGYKYLGPFNGLYKGEPVDEADAAALEHDKAYDRQLDSGDNPYLKYNHADAEFQERLKEDTSFGGNLGRAVFQAKKRVLEPLGLVGEPVKTAPGKKRPVEHSPVEPDSSSGTGKAGNQPARKRLNFGQTGDADSVPDPQPLGQPPAAPSGLGSTTMATGSGAPVADNNEGADGVGNSSGNWHCDSQWLGDRVITTSTRTWALPTYNNHLYKQISSQSGASNDNHYFGYSTPWGYFDFNRFHCHFSPRDRQRLINNNWGFRPKRLNFKLFNIQVKEVTQNDGTTTIANNLTSTVQVFTDSGYQLPYVLGLAHQGCLPPFPADVFMVPQYGYLTLNNGSQAVGRSSFYCLEYFPSQMLRTGNNFQFSYTFEDVPFHSSYAHSQSLDRLMNPLIDQYLYYLNKTQSNSGTLQQSRLLFSQAGPTSMSLQAKNWLPGPCYRQQRLSKQANDNNNSNFPWTAATKYHLNGRDSLVNPGPAMASHKDDEEKFFPMHGTLIFGKQGTNANDADLDNVMITDEEEIRTTNPVATEQYGYVSNNLQNSNTGPTTGTVNHQGALPGMVWQDRDVYLQGPIWAKIPHTDGHFHPSPLMGGFGLKHPPPQIMIKNTPVPANPPTNFSSAKFASFITQYSTGQVSVEIEWELQKEDSKRWNPEIQYTSNYNKPVNVDFTVDTNGVYSEPRPIGTRYLTRNL

SEQ ID NO: 1326 - protein, 735 aa, synthetic construct
  REGION 1..735: note = Synthetic
MAADGYLPDWLEDTLSEGIRQWWKLKPGPPPPKPAERHKDDSRGLVLPGYKYLGPFNGLYKGEPVNEADAAALEHDKAYDRQLDSGDNPYLKYNHAGAEFQERLKEDTSFGGNLGRAVFQAKKRVLEPLGLVEEPVKTAPGKKRPVEHSPVEPDSSSGTGKAGNQPARKRLNFGQTGDADSVPDPQPLGQPPAAPSGLGSTTMATGSGAPVADNNEGADGVGNSSGNWHCDSQWLGDRVITTSTRTWALPTYNNHLYKQISSQSGASNDNHYFGYSTPWGYFDFNRFHCHFSPRDWQRLINNNWGFRPKRLNFKLFNIQVKEVTQNDGTTTIANNLTSTVQVFTDSEYQLPYVLGSAHQGCLPPFPADVFMVPQYGYLTLNNGSQAVGRSSFYCLEYFPSQMLRTGNNFQFSYTFEDVPFHSSYAHSQSLDRLMNPLIDQYLYYLNKTQSNSGTLQQSRLLFSQAGPTSMSLQAKNWLPGPCYRQQRLSKQANDNNNSNFPWTAATKYHLNGRDSLVNPGPAMASHKDDEEKFFPMHGTLIFGKQGTNANDADLDNVMITDEEEIRTTNPVATEQYGYVSNNLQDSNTGPTTGTVNHQGALPGMVWQDRDVYLQGPIWAKIPHTDGHFHPSPLMGGFGLKHPPPQIMIKNTPVPANPPTNFSSAKFASFITQYSTGQVSVEIEWELQKENSKRWNPEIQYTSNYNKSVNVDFTVDTNGVYSEPRPIGTRYLTRNL

SEQ ID NO: 1327 - protein, 735 aa, synthetic construct
  REGION 1..735: note = Synthetic
MAADGYLPDWLEDTLSEGIRQWWKLKPGPPPPKPAERHKDDSRGLVLPGYKYLGPFNGLDKGEPVNEADAAALEHDKAYDRQLESGDNPYLKYNHADAEFQERLKEDTSFGGNLGRAVFQAKKRVLEPLGLVEEPVKTAPGKKRPVEHSPVEPDSSSGTGKAGQQPARKRLNFGQTGDADSVPDPQPLGQPPAAPSGLGSTTMASGSGAPVADNNEGADGVGNSSGNWHCDSQWLGDRVITTSTRTWALPTYNNHLYKQISSQSGASNDNHYFGYSTPWGYFDFNRFHCHFSPRDWQRLINNSWGFRPKRLNFKLFNIQVKEVTQNDGTTTIANNLTSTVQVFTDSEYQLPYVLGSAHQGCLPPFPADVFMVPQYGYLTLNNGSQAVGRSSFYCLEYFPSQMLRTGNNFQFSYTFEDVPFHSSYAHSQSLDRLLNPLIDQYLYYLNKTQSNSGTLQQSRLLFSQAGPTSMSLQAKNWLPGPCYRQQRLSKQANDNNNSNFPWTAATKYHLNGRDSLVNPGPAMASHKDDEEKFFPMHGTLIFGKQGTNANDADLDNVMITDEEEIRTTNPVATEQYGYVSNNLQNSNTGPTTGTVNHQGALPGMVWQDRDVYLQGPIWAKIPHTDGHFHPSPLMGGFGLKHPPPQIMIKNTPVPANPPTNFSSSKFASFITQYSTGQVSVEIEWELQKENSKRWNPEIQYTSNYNKSVNVDFTVDTNGVYSEPRPIGTRYPTRNL

SEQ ID NO: 1328 - protein, 735 aa, synthetic construct
  REGION 1..735: note = Synthetic
MAADGYLPDWLEDTLSEGIRQWWKLKPGPPPPKPAERHKDDSRGLVLPGYKYLGPFNGLDKGEPVNEADAAALEHDKAYDRQLDSGDNPYLKYNHADAEFQERLKEDTSFGGNLGRAVFQAKKRVLEPLGLVEGPVKTAPGKKRPVEHSPAEPDSSSGTGKAGQQPARKRLNFGQTGDADSVPDPQPLGQPPAAPSGLGSTTMATGSGAPMADNNEGADGVGNSSGNWHCDSQWLGDRVITTSTRTWALPTYNNHLYKQISSQSGASNDNHYFGYSTPWGYFDFNRFHCHFSPRDWQRLINNNWGFRPKRLNFKLFNIQVKEVTQNDGTTTIANNLTSTVQVFTDSEYQLPYVLGSAHQGCLPPFPADVFMVPQYGYLTLNNGSQAVGRSSFYCLEYFPSQMLRTGNNFQFSYTFEDVPFHSSYAHSQSLDRLMNPLIDQYLYYLNKTQSNSGTLQQSRLLFSQAGPTSMSLQAKNWLPGPCYRQQRLSKQANDNNNSNFPWTAATKYHLNGRDSLVNPGPAMASHKDDEEKFFPMHGTLIFGKQGTNANDADLDNVMITDEEEIRTTNPVATEQYGYVSNNLQNSNTGPTTGTVNHQGALPGMVWQDRDVYLQGPIWAKIPHTDGHFHPSPLMGGFGLKHPPPQIMIKNTPVPANPPTNFSSAKFASFITQYSTGQVSVEIEWELQKENSKRWNPEIQYTSNYNKSVNVDFTVDTNGVYSEPRPIGTRYLTRNL

SEQ ID NO: 1329 - protein, 735 aa, synthetic construct
  REGION 1..735: note = Synthetic
MAADGYLPDWLEDTLSEGTRQWWKLKPGPPPPKPAERHKDDSRGLVLPGYKYLGPFNGLDKGEPVNEADAAALEHDKAYDRQLDSGDNPYLKYNHADAEFQERLKEDTSFGGNLGRAVFQAKKRVLEPLGLVEEPVKTAPGKKRPVEHSPAEPDSSSGTGKAGQQPARKRLNFGQTGDADSVPDPQPLGQPPAAPSGLGSTTMATGSGAPMADNNEGADGVGNSSGNWHCDSQWLGDRVITTSTRTWALPTYNNHLYKQISSQSGASNDNHYFGYSTPWGYFDFNRFHCHFSPRDWQRLINNNWGFRPKRLNFKLFNIQVKEVTQNDGTTTIANNLTSTVQVFTDSEYQLPYVLGSAHQGCLPPFPADVFMVPQYGYLTLNNGSQAVGRSSFYCLEYFPSQMLRTGNNFQFSYTFEDVPFHSSYAHSQSLDRLMNPLIDQYLYYLNKTQSNSGTLQQSRLLFSQAGPTSMSLQAKNWLPGPCYRQQRLSKQANDNNNSNFPWTAATKYHLNGRDSLVNPGPAMASHKDDEEKFFPMHGTLIFGKQGTNANDADLDNVMITDEEEIRTTNPVATEQYGYVSNNLQNSNTGPTTGTVNHQGALPGMVWQDRDVYLQGPIWAKIPHTDGHFHPSPLMGGFGLKHPPPQIMIKNTPVPANPPTNFSSAKFASFITQYSTGQVSVEIEWELQKENSKRWNPEIQYTSNYNKSVNVDFTVDTNGVYSEPRPIGTRYLTRNL

SEQ ID NO: 1330 - protein, 735 aa, synthetic construct
  REGION 1..735: note = Synthetic
MAADGYLPDWLEDTLSEGIRQWWKLKPGPPPPKPAERHKDDSRGLVLPGYKYLGPFNGLDKGEPVNEADAAALEHDKAYDRQLDSGDNPYLKYNHADAEFQERLKEDTSFGGNLGRAVFQAKKRVLEPLGLVEEPVKTAPGKKRPVEHSPAEPDSSSGTGKAGQQPARKRLNFGQTGDADSVPDPQPLGQPPAAPSGLGSTTMATGSGAPMADNNEGADGVGNSSGNWHCDSQWLGDRVITTSTRTWAQPTYNNHLYKQISSQSGASNDNHYFGYSTPWGYFDFNRFHCHFSPRDWQRLINNNWGFRPKRLNFKLFNIQVKEVTQNDGTTTIANNLTSTVQVFTDSEYQLPYVLGSAHQGCLPPFPADVFMVPQYGYLTLNNGSQAVGRSSFYCLEYFPSQMLRTGNNFQFSYTFEDVPFHSSYAHSQSLDRLMNPLIDQYLYYLNKTQSNSGALQQSRLLFSQAGPTSMSLQAKNWLPGPCYRQQRLSKQANDNNNSNFPWTAATKYHLNGRDSLVNPGPAMASHKDDEEKFFPMHGTLIFGKQGTNANDADLDNVMITDEEEIRTTNPVATEQYGYVSNNLQNSNTGPTTGTVNHRGALPGMVWQDRDVYLQGPIWAKIPHTDGHFHPSPLMGGFGLKHPPPQIMIKNTPVPANPPTNFSSAKFASFITQYSTGQVSVEIEWELQKENSKRWNPEIQYTSNYNKSVNVDFTVDTNGVYSEPRPIGTRYLTRNL

SEQ ID NO: 1331 - protein, 735 aa, synthetic construct
  REGION 1..735: note = Synthetic
MAADGYLPDWLEDTLSEGIRQWWKLKPGPPPPKPAERHQDDSRGLVLPGYKYLGPFNGLDKGEPVNEADAAALEHDKAYDRQLDSGDNPYLKYNHADAEFQERLKEDTSFGGNLGRAVFQAKKRVLEPLGLVEEPVKTAPGKKRPVEHSPVEPDSSSGTGKAGHQPARKRLNFGQTGDADSVPDPQPLGQPPAAPTSLGSTTMATGSGAPMADNNEGADGVGNSSGNWHCDSQWLGDRVITTSTRTWALPTYNNHLYKQISSQSGASNDNHYFGYSTPWGYFDFNRFHCHFSPRDWQRLINNNWGFRPKRLNFKLFNIQVKEVTQNDGTTTIANNLTSTVQVFTDSEYQLPYVLGSAHQGCLPPFPADVFMVPQYGYLTLNNGSQAVGRSSFYCLEYFPSQMLRTGNNFTFSYTFEDVPFHSSYAHSQSLDRLMNPLIDQYLYYLNRTQSNSGTLQQSRLLFSQAGPTSMSLQAKNWLPGPCYRQQRLSKQANDNNNSNFPWTAATKYRLNGRDSLVNPGPAMASHKDDEEKFFPMHGTLIFGKQGTNANDADLEHVMITDEEEIRTTNPVATEQYGNVSNNLQNSNTGPTTENVNHQGALPGMVWQDRDVYLQGPIWAKIPHTDGHFHPSPLMGGFGLKHPPPQIMIKNTPVPANPPTNFSSAKFASFITQYSTGQVSVEIEWELQKENSKRWNPEIQYTSNYNKSVNVDFTVDTNGVYSEPRPIGTRYLTRNL

SEQ ID NO: 1332 - protein, 735 aa, synthetic construct
  REGION 1..735: note = Synthetic
MAADGYLPDWLEDTLSEGIRQWWKLKPGPPPPKPAERHQDDSRGLVLPGYKYLGPFNGLDKGEPVNEADAAALEHDKAYDRQLDSGDNPYLKYNHADAEFQERLKEDTSFGGNLGRAVFQAKKRVLEPLGLVEEPVKTAPGKKRPVEHSPVEPDSSSGTGKAGHQPARKRLNFGQTGDADSVPDPQPLGQPPAAPTSLGSTTMATGSGAPMADNNEGADGVGNSSGNWHCDSQWLGDRVITTSTRTWALPTYNNHLYKQISSQSGASNDNHYFGYSTPWGYFDFNRFHCHFSPRDWQRLINNNWGFRPKRLNFKLFNIQVKEVTQNDGTTTIANNLTSTVQVFTDSEYQLPYVLGSAHQGCLPPFPADVFMVPQYGYLTLNNGSQAVGRPSFYCLEYFPSQMLRTGNNFTFSYTFEDVPFHSSYAHSQSLDRLMNPLIDQYLYYLNRTQSNSGTLQQSRLLFSQAGPTSMSLQAKNWLPGPCYRQQRLSKQANDNNNSNFPWTAATKYHLNGRDSLVNPGPAMASHKDDEEKFFPMHGTLIFGKQGTNANDADLEHVMITDEEEIRTTNPVATEQYGNVSNNLQNSNTGPTTENVNHQGALPGMVWQDRDVYLQGPIWAKIPHTDGHFHPSPLMGGFGLKHPPPQIMIKNTPVPANPPTNFSSAKFASFITQYSTGQVSVEIEWELQKENSKRWNPEIQYTSNYNKSVNVDFTVDTNGVYSEPRPIGTRYLTRNL

SEQ ID NO: 1333 - protein, 735 aa, synthetic construct; identical to SEQ ID NO: 1332
  REGION 1..735: note = Synthetic

SEQ ID NO: 1334 - protein, 735 aa, synthetic construct
  REGION 1..735: note = Synthetic
MAADGYLPDWLEDTLSEGIRQWWKLKPGPPPPKLAERHQDDSRGLVLPGYKYLGPFNGLDKGEPVNEADAAALEHDKAYDRQLDSGDNPYLKYNHADAEFQERLKEDTSFGGNLGRAVFQAKKRVLEPLGLVEEPVKTAPGKKRPVEHSPVEPDSSSGTGKAGHQPARKRLNFGQTGDADSVPDPQPLGQPPAAPTSLGSTTMATGSGAPMADNNEGADGVGNSSGNWHCDSQWLGDRVITTSTRTWALPTYNNHLYKQISSQSGASNDNHYFGYSTPWGYFDFNRFHCHFSPRDWQRLINNNWGFRPKRLNFKLFNIQVKEVTQNDGTTTIANNLTSTVQVFTDSEYQLPYVLGSAHQGCLPPFPADVFTVPQYGYLTLNNGSQAVGRSSFYCLEYFPSQMLRTGNNLTFSYTFEDVPFHSSYAHSQSLDRLMNPLIDQYLYYLNRTQSNSGTLQQSRLLFSQAGPTSMSLQAKNWLPGPCYRQQRLSKQANDNNNSNFPWTAATKYHLNGRDSLVNPGPAMASHKDDEEKFFPMHGTLIFGKQGTNANDADLEHVMITDEEEIRTTNPVATEQYGNVSNNLQNSNTGPTTENVNHQGALPGMVWQDRDVYLQGPIWAKIPHTDGHFHPSPLMGGFGLKHPPPQIMIKNTPVPANPPTNYSSAKFASFITQYSTGQVSVEIEWELRKENSKRWNPEIQYTSNYNKSVNVDFTVDTNGVYSEPRPIGTRYLTRNL

SEQ ID NO: 1335 - protein, 736 aa, synthetic construct
  REGION 1..736: note = Synthetic
MAADGYLPDWLEDNLSEGIREWWDLKPGAPKPKANQQKQDDGRGLVLPGYKYLGPFNGLDKGEPVNAADAAALEHDKAYDQQLKAGDNPYLRYNHADAEFQERLQEDTSFGGNLGRAVFQAKKRVLEPLGLVEEGAKTAPGKKRPVEQSPQEPDSSSGIGKTGQQPAKKRLNFGQTGDSESVPDPQPLGEPPATPAAVGPTTMASGGGAPMADNNEGADGVGNASGNWHCDSTWLGDRVITTSTRTWALPTYNNHLYKQISSTSTGASNDNHYFGYGTPWGYFDFNRFHCHFSPRDWQRLINNNWGFRPKRLNFKLFNIQVEEVTTNDGVTTIANNLTSTVQVFSDSEYQLPYVLGSAHQGCLPPFPADVFMIPQYGYLTLNNGSQAVGRSSFYCLEYFPSQMLRTGNNFTFSYTFEEVPFHSSYAHSQSLDRLMNPLIDQYLYYLNRTQNQSGSAQNKDLLFSRGSPAGMSVQPKNWLPGPCYRQQRVSKTKTDNNNSNFTWTGASKYNLNGRESIINPGTAVASHKDDEDKFFPMSGVMIFGKESAGASSTALDNVMITDEEEIKATNPVATERFGTVAVNFQSSSTDPATGDVHAMGALPGMVWQDRDVYLQGPIWAKIPHTDGHFHPSPLMGGFGLKNPPPQILIKNTPVPANPPAEFSATKFASFITQYSTGQVSVEIEWELQKENSKRWNPEVQYTSNYAKSANVDFTVDNNGLYTEPRPIGTRYLTRPL

SEQ ID NO: 1336 - protein, 736 aa, synthetic construct
  REGION 1..736: note = Synthetic
MAADGYLPDWLEDTLSEGIRQWWKLRPGPPPPKPAERHKDDSRGLVLPGYKYLGPFNGLDKGEPVNEADAAALEHDKAYDRQLDSGDNPYLKYNHADAEFQERLKEDTSFGGNLGRAVFQAKKRVLEPLGLVEEGAETAPGKKRPVEQSPQGPDSSSGIGKTGQQPAKKRLNFGQTGDSESVPDPQPLGEPPATPAAVGPTTMASGGGAPMADNNEGADGVGNASGNWHCDSTWLGDRVITTSTRTWALPTYNNHLYKQISSASTGASNDNHYFGYSTPWGYFDFNRFHCHFSPRDWQRLINNNWGFRPKRLNFKLFNIQVKEVTTNDGVTTIANNLTSTVQVFSDSEYQLPYVLGSAHQGCLPPFPADVFMIPQYGYLTLNNGSQAVGRSSFYCLEYFPSQMLRTGNNFTFSYTFEEVPFHSSYAHSQSLDRLMNPLIDQYLYYPNRTQNQSGSAQNKDLLFSRGSPAGMSVQPKNWLPGPCYRQQRVSKTKTDNNNSNFTWTGASKYNLNGRESIINPGTAMASHKDDEDKFFPMSGVMIFGKESAGASNTALDNVMITDEEEIKATNPVATERFGTVAVNFQSSSTDPATGDVHAMGALPGMVWQGRDVYLQGPIWAKIPHTDGHFHPSPLMGGFGLKNPPPQILIKNTPVPANPPAEFSATKFASFITQYSTGQVSVEIEWELQKENSKRWNPEVQYTSNYAKSANVDFTVDNNGLYTEPRPIGTRYLTRPL

SEQ ID NO: 1337 - protein, 736 aa, synthetic construct
  REGION 1..736: note = Synthetic
MAADGYLPDWLEDTLSEGIRQWWKLKPGPPPPKPAERHKDDSRGLVLPGYKYLGPFNGLDKGEPVNEADAAALEHDKAYDRQLDSGDNPYLKYNHADAEFQERLKEDTSFGGNLGRAVFQAKKRVLEPLGLVEEGAKTAPGKKRPVEQSPQEPDSPSGIGKTGQQPAKKRLNFGQTGDSESVPDPQPLGEPPATPAAVGPTTMASGGGAPMADNNEGADGVGNASGNWHCDSTWLGDRVITTSTRTWALPTYNNHLYKQISSASTGASNDNHYFGYSTPWGYFDFNRFHCHFSPRDWQRLINNNWGFRPKRLNFKLFNIQVKEVTTNDGVTTIANNLTSTVQVFSDSEYQLPYVLGSAHQGRLPPFPADVFMIPQYGYLTLNNGSQAVGRSSSYCLEYFPSQMLRTGNNFTFSYTFEEVPLHSSCAHSQSLDRLMNPLIDQYLYYLNRTQNQSGSAQNRDLLFSRGSPAGMSVQPKNWLPGPCYRQQRVSKTKTDNNNSNFTWTGASKYNLNGRESIINPGTAMASHKDDEDKFFPMSGVMIFGKESAGASNTALDNVMITDEEEIKATNPVATERFGTVAVNFQSSSTDPATGDVHAMGALPGMVWQDRDVYLQGPIWAKIPHTDGHFHPSPLMGGFGLKNPPPQILIKNTPVPANPPAEFSATKFASFITQYSAGQVSVEIEWELQKENSKRWNPEVQYTSNYAKSANVDFTVDNNGLYTEPRPIGTRYLTRPL

SEQ ID NO: 1338 - protein, 737 aa, synthetic construct
  REGION 1..737: note = Synthetic
MAADGYLPDWLEDNLSEGIREWWDLKPGAPKPKANQQKQDDGRGLVLPGYKYLGPFNGLDKGEPVNAADAAALEHDKAYDQQLKAGDNPYPRYNHADAEFQERLQEDTPFGGNLGRAVFQAKKRVLEPLGLVEEAAKTAPGKKRPVEPSPQRSPDSSTGIGKKGQQPAKKRLNFGQTGDSESVPDPQPIGEPPAGPSGLGSGTMAAGGGAPMADNNEGADGVGNASGNWHCDSTWLGDRVITTSTRTWALPTYNNHLYKQISSASTGASNDNHYFGYSTPWGYFDFNRFHCHFSPRDWQRLINNNWGFRPKRLNFKLFNIQVKEVTTNDGVTTIANNLTSTVQVFSDSEYQLPYVLGSAHQGCLPPFPADVFMIPQYGYLTLNNGSQAVGRSSFYCLEYFPSQMLRTGNNFTFSYTFEEVPLHSSYAHSQSLDRLMNPLIVQYLYYLNRTQNQSGSAQNKDLLFSRGSPAGMSVQPKNWLPGPCYRQQRVSKTKTDNNNSNFTWTGASKYNLNGRESIINPGTAMASHKDDEDKFFPMSGVMIFGKESAGASNTALDNVMITDEEEIKATNPVATERFGTVAVNFQSSSTDPATGDVHAMGALPGMVWQDRDVYLQGPIWAKIPHTDGHFHPSPLMGGFGLKNPPPQILIKNTPVPANPPAEFSATKFASFITQYSTGQVSVEIEWELQKENSKRWNPEVQYTSNYAKSASVDFTVDNNGLYTEPRPIGTRYLTRPL

SEQ ID NO: 1339 - protein, 738 aa, synthetic construct
  REGION 1..738: note = Synthetic
MAADGYLPDWLEDNLSEGIREWWDLKPGAPKPKANQQKQDDGRGLVLPGYKYLGPFNGLDKGEPVNAADAAALEHDKAYDQQLKAGDNPYLRYNHADAEFQERLQEDTSFGGNLGRAVFQAKKRVLEPLGLVEEAAKTAPGKKRPVEPSPQRSPDSSTGIGKKGQQPAKKRLNFGQTGDSESVPDPQPIGEPPAGPSGLGSGTMAAGGGAPMADNNEGADGVGSSSGNWHCDSTWLGDRVITTSTRTWALPTYNNHLYKQISNGTSGGSTNDNTYFGYSTPWGYFDFNRFHCHFSPRDWQRLINNNWGFRPKRLSFKLFNIQVKEVTQNEGTKTIANNLTSTIQVFTDSEYQLPYVLGSAHQGCLPPFPADVFMIPQYGYLTLNNGSQAVGRSSFYCLEYFPSQMLRTGNNFEFSYTFEDVPFHSSYAHSQSLDRLMNPLIDQYLYYLSRTQSTGGTQGTQQLLFSQAGPANMSAQAKNWLPGPCYRQQRVSTTLSQNNNSNFAWTGATKYHLNGRDSLVNPGVAMATHKDDEERFFPSSGVLMFGKQGAGRDNVDYSSVMLTSEEEIKTTNPVATEQYGVVADNLQQTNTGPIVGNVNSQGALPGMVWQNRDVYLQGPIWAKIPHTDGNCHPSPLMGGFGLKHPPPQILIKNTPVPADPPTTFSQAKLASFITQYSTGQVSVEIEWELQKENSKRWNPEIQYTSNYYKSTNVDFAVNTEGTYSEPRPIGTRYLTRNL

SEQ ID NO: 1340 - protein, 736 aa, synthetic construct
  REGION 1..736: note = Synthetic
MAADGYLPDWLEDNLSEGIREWWDLKPGAPKPKANQQKQDDGRGLVLPGYKYLGPFNGLDKGEPVNAADAAALEHDKAYDQQLKAGDNPYLRYNHADAEFQERLQEDTSFGGNLGRAVFQAKKRVLEPLGLVEEGAKTAPGKKRPVEQSPQEPDSSSGIGKTGQQPAKKRLNFGQTGDSESVPDPQPLGEPPATPAAVGPTTMASGGGAPMADNNEGADGVGNASGNWHCDSTWLGDRVITTSTRTWALPTYNNHLYKQISSASTGASNDNHYFGYSTPWGYFDFNRFHCHFSPRDWQRLINNNWGFRPKRLNFKLFNIQVKEVTTNDGVTTIANNLTSTVQVFSDSEYQLPYVLGSAHQGCLPPFPADVFMIPQYGYLTLNNGSQAVGRSSFYCLEYFPSQMLRTGNNFTFSYTFEEVPFHSSYAHSQSLDRLMNPLIDQYLYYLNRTQNQSGSAQNKDLLFSRGSPAGMSVQPKNWLPGPCYRQQRVSKTKTDNNNSNFTWTGASKYNLNGRESIINPGTAMASHKDDEDKFFPMSGVMIFGKESAGASNTALDNVMITDEEEIKATNPVATERFGTVAVNFQSSSTDPATGDVHAMGALPGMVWQDRDVYLQGPIWAKIPHTDGHFHPSPLMGGFGLKNPPPQILIKNTPVPANPPAEFSATKFASFITQYSTGQVSVEIEWELQKENSKRWNPEVQYTSNYAKSANVDFTVDNNGLYTEPRPIGTRYLTRPL

SEQ ID NO: 1341 - protein, 736 aa, synthetic construct
  REGION 1..736: note = Synthetic
MAADGYLPDWLEDNLSEGIREWWDLKPGAPKPKANQQKQDDGRGLVLPGYKYLGPFNGLDKGEPVNAADAAALEHDKAYDQQLEAGDNPYLRYNHADAEFQERLQEDTSFGGNLGRAVFQAKKRVLEPLGLVEEGAKTAPGKKRPVEQSPQEPDSSSGIGKKGQQPARKRLNFGQTGDSESVPDPQPLGEPPAAPSGVGPNTMAAGGGAPMADNNEGADGVGSSSGNWHCDSTWLGDRVITTSTRTWALPTYNNHLYKQISNGTSGGATNDNTYFGYSTPWGYFDFNRFHCHFSPRDWQRLINNNWGFRPKRLSFKLFNIQVKEVTQNEGTKTIANNLTSTIQVFTDSEYQLPYVLGSAHQGCLPPFPADVFMIPQYGYLTLNNGSQAVGRSSFYCLEYFPSQMLRTGNNFQFTYTFEDVPFHSSYAHSQSLDRLMNPLIDQYLYYLSRTQTTGGTANTQTLGFSQGGPNTMANQAKNWLPGPCYRQQRVSTTTGQNNNSNFAWTAGTKYHLNGRNSLANPGIAMATHKDDEERFFPVTGSCFWQQNAARDNADYSDVMLTSEEEIKTTNPVATEEYGIVADNLQQQNTAPQIGTVNSQGALPGMVWQNRDVYLQGPIWAKIPHTDGNFHPSPLMGGFGLKHPPPQILIKNTPVPADPPTTFNQSKLNSFITQYSTGQVSVEIEWELQKENSKRWNPEIQYTSNYYKSTSVDFAVNTEGVYSEPRPIGTRYLTRNL

SEQ ID NO: 1342 - protein, 735 aa, synthetic construct
  REGION 1..735: note = Synthetic
MAADGYLPDWLEDTLSEGIRQRWKLKPGPPPPEPAERHKDDSRGLVLPGYKYLGPFNGLDKGEPVNEADAAALEHDKAYDRQLDSGDNPYLKYNHADAEFQERLKEDTSFGGNLGRAVFQAKKRVLEPLGLVEEPVKTAPGKKRPVEHSPVEPDSSSGTGKAGQQPARKRLNFGQTGDADSVPDPQPLGQPPAAPSGLGTNTMATGSGAPMADNNEGADGVGNSSGNWHCDSTWMGDRVITTSTRTWALPTYNNHLYKQISSQSGASNDNHYFGYSTPWGYFDFNRFHCHFSPRDWQRLINNNWGFRPKRLNFKLFNIQVKEVTQNDGTTTIANNLTSTVQVFTDSEYQLPYVLGSAHQGCLPPFPADVFMVPQYGYLTLNNGSQAVGRSSFYCLEYFPSQMLRTGNNFTFSYTFEDVPFHSSYAHSQSLGRLMNPLIDQYLYYLSRTNTPSGTTTQSRLQFSQAGASDIRDQSRNWLPGPCYRQQRVSKTSADNNNSEYSWTGATKYHLNGRDSLVNPGPAMASHKDDEEKFFPQSGVLIFGKQGSEKTNVDIEKVMITDEEEIRTTNPVATEQYGSVSTNLQRGNRQAATADVNTQGVLPGMVWQDRDVYLQGPIWAKIPHTDGHFHPSPLMGGFGLKHPPPQILIKNTPVPANPSTTFSAAKFASFITQYSTGQVSVEIEWELQKENSKRWNPEIQYTSNYNKSVNVDFTVDTNGVYSEPRPIGTRYLTRNL

SEQ ID NO: 1343 - protein, 735 aa, synthetic construct
  REGION 1..735: note = Synthetic
MAADGYLPDWLEDTLSEGIRQWWKLKPGPPPPKPAERHKDDSRGLVLPGYKYLGPFNGLDKGEPVNEADAAALEHDKAYDRQLDSGDNPYLKYNHADAEFQERLKEDTSFGGNLGRAVFQAKKRVLEPLGLVEEPVKTAPGKKRPVEHSPVEPDSSSGTGKAGQQPARKRLNFGQTGDADSVPDPQPLGQPPAAPSGLGSTTMATGSGAPMADNNEGADGVGNSSGNWHCDSQWLGDRVITTSTRTWALPTYNNHLYKQISSQSGASNDNHYFGYSTPWGYFDFNRFHCHFSPRDWQRLINNNWGFRPKRLNFKLFNIQVKEVTQNDGTTTIANNLTSTVQVFTDSEYQLPYVLGSAHQGCLPPFPADVFMVPQYGYLTLNNGSQAVGRSSFYCLEYFPSQMLRTGNNFQFSYTFEDVPFHSSYAHSQSLDRLMNPLVDQYLYYLNKTQTNSGTLQQSRLLFSQAGPTNMSLQAKNWLPGPCYRQQRLSKQANDNNNSNFPWTAATKYHLNGRDSLVNPGPAMASHKDDEEKFFPMHGTLIFGKQGTNANDADLENVMITDEEEIRTTNPVATEQYGTVSNNLQNSNTGPTTGTVNHQGALPGMVWQDRDVYLQGPIWAKIPHTDGHFHPSPLMGGFGLKHPPPQIMIKNTPVPANPPTNFSSAKFASFITQYSTGQVSVEIEWELQKENSKRWNPEIQYTSNYNKSVNVDFTVDTNGVYSEPRPIGTRYLTRNL

SEQ ID NO: 1344 - protein, 735 aa, synthetic construct
  REGION 1..735: note = Synthetic
MAADGYLPDWLEDTLSEGIRQWWKLKPGPPPPKPAERHKDDSRGLVLPGYKYLGPFNGLDKGEPVNEADAAALEHDKAYDRQLDSGDNPYLKYNHADAEFQERLKEDTSFGGNLGRAVFQAKKRVLEPLGLVEEPVKTAPGKKRPVEHPPVEPDSSSGTGKAGQQPARKRLNFGQTGDADSVPDPQPLGQPPAAPSGLGSTTMATGSGAPMADNNEGADGVGNSSGNWHCDSQWLGDRVITTSTRTWALPTYNNHLYKQISSQSGASNDNHYFGYSTPWGYFDFNRFHCHFSPRDWQRLINNNWGFRPKRLNFKLFNIQVKEVTQNDGTTTIANNLTSTVQVFTDSEYQLPYVLGSAHQGCLPPFPADVFMVPQYGYLTLNNGSQAVGRSSFYCLEYFPSQMLRTGNNFQFSYTFEDVPFHSSYAHSQSLDRLMNPLIDQYLYYLNKTQTNSGTLQQSRLLFSQAGPTNMSLQAKNRLPGPCYRQQRLSKQANDNNNSNFPWTAATKYHLNGRDSLVNPGPAMASHKDDEEKFFPMHGTLIFGKQGTNANDADLENVMITDEEEIRTTNPVATEQYGTVSNNLQNSNTGPTTGTVNHQGALPGMVWQDRDVYLQGPIWAKIPHTDGHFHPSPLVGGFGLKHPPPQIMIKNTPVPANPPTNFSSAKFASFITQYSTGQVSVEIEWELQKENSKRWNPEIQYTSNYNKSVNVDFTVDTNGVYSEPRPIGTRYLTRNL

SEQ ID NO: 1345 - protein, 734 aa, synthetic construct
  REGION 1..734: note = Synthetic
MAADGYLPDWLEDTLSEGIRQWWKLKPGPPPPKPAERHKDDSRGLVLPGYKYLGPFNGLDKGEPVNEADAAALEHDKAYDRQLDSGDNPYLKYNHADAEFQERLKEDTSFGGNLGRAVFQAKKRVLEPLGLVEEPVKTAPGKKRPVEHSPAEPDSSSGTGKAGQQPARKRLNFGQTGDADSVPDPQPLRQPPAAPTSLGSTTMATGSGAPMADNNEGADGVGNSSGNWHCDSQWLGDRVITTSTRTWALPTYNNHLYKQISSQSGASNDNHYFGYSTPWGYFDFNRFHCHFSPRDWQRLINNNWGFRPKRLNFKLFNIQVKEVTQNDGTTTIANNLTSTVQVFTDSEYQLPYVLGSAHQGCLPPFPADVFMVPQYGYLTLNNGSQAVGRSSFYCLEYFPSQMLRTGNNFQFSYTFEDVPFHSSYAHSQSLDRLMNPLIDQYLYYLNRTQTASGTQQSRLLFSQAGPTSMSLQAKNWLPGPCYRQQRLSKQANDNNNSNFPWTGATKYYLNGRDSLVNPGPAMASHKDDEEKFFPMHGTLIFGKEGTNATNAELENVMITDEEEIRTTNPVATEQYGYVSNNLQNSNTAASTETVNHQGALPGMVWQDRDVYLQGPIWAKIPHTDGHFHPSPLMGGFGLKHPPPQIMIKNTPVPANPPTNFSSAKFASFITQYSTGQVSVEIEWELQKENSKRWNPEIQYTSNYNKSVNVDFTVDTNGVYSEPRPIGTRYLTRNL

SEQ ID NO: 1346 - protein, 734 aa, synthetic construct
  REGION 1..734: note = Synthetic
MAADGYLPDWLEDTLSEGIRQWWKLKPGPPPPKPAERHKDDSRGLVLPGYKYLGPFNGLDKGEPVNEADAAALEHDKAYDRQLDSGDNPYLKYNHADAEFQERLKEDTSFGGNLGRAVFQAKKRVLEPLGLVEEPVKTAPGKKRPVEHSPAEPDSSSGTGKAGQQPARKRLNFGQTGDADSVPDPQPLGQPPAAPTSLGSTTMATGSGAPMADNNEGADGVGNSSGNWHCDSQWLGDRVITTSTRTWALPTYNNHLYKQISSQSGASNDNHYFGYSTPWGYFDFNRFHCHFSPRDWQRLINNNWGFRPKRLNFKLFNIQVKEVTQNDGTTTIANNLTSTVQVFTDSEYQLPYVLGSAHQGCLPPFPADVFMVPQYGYLTLNNGSQAVGRSSFYCLECFPSQMLRTGNNFQFSYTFEDVPFHSSYAHSQSLDRLMNPLIDQYLYYLNRTQTASGTQQSRLLFSQAGPTSMSLQAKNWLPGPCYRQQRLSKQANDNNNSNFPWTGATKYHLNGRDSLVNPGPAMASHKDDEEKFFPMHGTLIFGKEGTNATNAELENVMITDEEEIRTTNPVATEQYGYVSNNLQNSNTAASTETVNHQGALPGMVWQDRDVYLQGPIWAKIPHTDGHFHPSPLMGGFGLKHPPPQIMIKNTPVPANPPTNFSSAKFASFITQYSTGQVSVEIEWELQKENSKRWNPEIQYTSNYNKSVNVDFTVDTNGVYSEPRPIGTRYLTRNL

SEQ ID NO: 1347 - protein, 734 aa, synthetic construct
  REGION 1..734: note = Synthetic
MAADGYLPDWLEDTLSEGIRQWWKLKPGPPPPKPAERHKDDSRGLVLPGYKYLGPFNGLDKGEPVNEADAAALEHDKAYDRQLDSGDNPYLKYNHADAEFQERLKEDTSFGGNLGRAVFQAKKRVLEPLGLVEEPVKTAPGKKRPVEHSPAEPDSSSGTGKAGQQPARKRLNFGQTGDADSVPDPQPLGQPPAAPTSLGSTTMATGSGAPMADNNEGADGVGNSSGNWHCDSQWLGDRVITTSTRTWALPTYNNHLYKQISSQSGASNDNHYFGYSTPWGYFDFNRFHCRFSPRDWQRLINNNWGFRPKRLNFKLFNIQVKEVTQNDGTTTIANNLTSTVQVFTDSEYQLPYVLGSAHQGCLPPFPADVFMVPQYGYLTLNNGSQAVGRSSFYCLEYFPSQMLRTGNNFQFSYTFEDVPFHSSYAHSQGLDRLMNPLIDQYLYYLNRTQTASGTQQSRLLFSQAGPTSMSLQAKNWLPGPCYRQQRLSKQANDNNNSNFPWTGATKYHLNGGDSLVNPGPAMASHKDDEEKFFPMHGTLIFGKEGTNATNAELENVMITDEEEIRTTNPVATEQYGYVSNNLQNSNTAASTETVNHQGALPGMVWQDRDVYLRGPIWAKIPHADGHFHPSPLMGGFGLKHPPPQIMIKNTPVPANPPTNFSSAKFASFITQYSTGQVSVEIEWELQKENSKRWNPEIQYTSNYNKSVNVDFTVDTNGVYSEPRPIGTRYLTRNL

SEQ ID NO: 1348 - protein, 735 aa, synthetic construct
  REGION 1..735: note = Synthetic
MAADGYLPDWLKDTLSEGIRQWWKLKPGPPPPKPAERHKDDSGGLVLPGYKYLGPFNGLDKGEPVNEADAAALEYDKAYDRQLDSGDNPYLKYNHADAEFQERLKEDTSFGGNLGRAVFQAKKRVLEPLGLVEEPVKTAPGKKRPVEHSPVEPDSSSGTGKAGQQPARKRLNFGQTGDADSVPDPQPLGQPPAAPSGLGTNTMATGSGAPMADNNEGADGVGNSSGSWHCDSTWMGDRVITTSTRTWALPTYNNHLYKQISSQSGASNDNHYFGYSTPWGYFDFNRFHCHFSPRDWQRLINNNWGFRPKRLNFKLFNIQVKEVTQNDGTTTIANNLTSTVQVFTDSEYQLPYVPGSAHQGCLPPFPADVFMVPQYGYLTLNNGSQAVGRSSFYCLEYFPSQMLRTGNNFTFSYTFEDVPFHSSYAHSQSLDRLMNPLIDQYLYYLSRTNTPSGTTTQSRLQFSQAGASDIRDQSRNWLPGPCYRQQRVSKTAADNNNSEYSWTGATKYHLNGRDSLVNPGPAMASHKDDEEKFFPQSGVLIFGKQGSEKTNVDIEKVMITDEEEIRTTNPVATEQYGSVSTNLQSGNTQAATADVNTQGVLPGMVWQDRDVHLQGPIWAKIPHTDGHFHPSPLMGGFGLKHPPPQILIKNTPVPANPSTTFSAAKFASFITQYSTGQVSVEIEWELQKENSKRWNPEIQYTSNYNKSVNVDFTVDTNGVYSEPRPIGTRYLTRNL

SEQ ID NO: 1349 - protein, 735 aa, synthetic construct
  REGION 1..735: note = Synthetic
MAADGYLPDWLEDTLSEGIRQWWKLKPGPPPPKPAERHKDDSRGLVLPGYKYLGPFNGLDKGEPVNEADAAALEHDKAYDRQLDSGDNPYLKYNHADAEFQERLKEDTSFGGNLGRAVFQAKKRVLEPLGLVGEPVKTAPGKKRPVEHSPVEPDSSSGTGKAGQQPARKRLNFGQTGDADSVPDPQPLGQPPAAPSGLGTNTMATGSGAPMADNNEGADGVGNSSGNWHCDSTWMGDRVITTSTRTWALPTYNNHLYKQISSQSGASNDNHYFGYSTPWGYFDFNRFHCHFSPRDWQRLINNNWGFRPKRLNFKLFNIQVKEVTQNDGTTTIANNLTSTVQVFTDSEYQLPYVLGSAHQGCLPPFPADVFMVPQYGYLTLNNGSQAVGRSSFYCLEYFPSQMLRTGNNFTFSYTFEDVPFHSGYAHSQSLDRLMNPLIDQYLYYLSTTNTPSGTTTQSRLQFSQAGASDIRDQSRNWLPGPCYRQQRVSKTSADNNNSEYSWTGATKYHLNGRDSLVNPGPAMASHKDNEEKFFPQSGVLIFGKQGSEKTNVDIEKVMITDEEEIRTTNPVATEQYGSVSTNLQRGNRQAATADVNTQGVLPGMVWQDRDVYLQGPIWAKIPHTDGHFHPSPLMGGFGLKHPPPQILIKNTPVPANPSTTFSAAKFASFITQYSTGQVSVEIEWELQKENSKRWNPEIQYTSNYNKSVNVDFTVDTNGVYSEPRPIGTRYLTRNL

SEQ ID NO: 1350 - protein, 735 aa, synthetic construct
  REGION 1..735: note = Synthetic
MAADGYLPDWLEDTLSEGIRQWWKLKPGPPPPKPAERHKDDSRGLVLPGYKYLGPFNGLDKGEPVNEADAAALEHDKAYDRQLDSGDNPYLKYNHADAEFQERLKEDTSFGGNLGRAVFQAKKRVLEPLGLVGEPVKTAPGKKRPVEHSPVEPDSSSGTGKAGQQPARKRLNFGQTGDADSVPDPQPLGQPPAAPSGLGTNTMATGSGAPMADNNEGADGVGNSSGNRHCDSTWMGDRVITTSTRTWALPTYNNHLYRQISSQSGASNDNHYFGYSTPWGYFDFNRFHCHFSPRDWQRLINNNWGFRPKRLNFKLFNIQVKEVTQNDGTTTIANNLTSTVQVFTDSEYQLPYVLGSAHQGCLPPFPADVFMVPQYGYLTLSNGSQAVGRSSFYCPEYFPSQMLRTGNNFTFSYTFEDVPFHSSYAHSQSLDRLMNPLIDQYLYYLSTTNTPSGTTTQSRLQFSQAGASDIRDQSRNWLPGPCYRQQRVSKTSADNNNSEYSWTGATKYHLNGRDSLVNPGPAMASHKDNEEKFFPQSGVLIFGKQGSEKTNVDIEKVMITDEEEIRTTNPVATEQYGSVSTNLQRGNRQAATADVNTQGVLPGMVWQDRDVYLQGPIWAKIPHTDGHFHPSPLMGGFGPKHPPPQILIKNTPVPANPSTTFSAAKFASFITQYSTGQVSVEIEWELQKENSKRWNPEIQYTSNYNKSVNVDFTVDTNGVYSEPRPIGTRYLTRNL

SEQ ID NO: 1351 - protein, 735 aa, synthetic construct
  REGION 1..735: note = Synthetic
MAADGYLPDWLEDTLSEGIRQWWKLKPGPPPPKPAERHKDDSRGLVLPGYKYLGPFNGLDKGEPVNEADAAALEHDKAYDRQLDSGDNPYLKYNHADAEFQERLKEDTSFGGNLGRAVFQAKKRVLEPLGLVEEPVKTAPGKKRPVEHSPVEPDSSSGTGKAGNQPARKRLNFGQTGDADSVPDPQPLGQPPASPSGLGTNTMATGSGAPMADNNEGADGVGNSSGNWHCDSTWMGDRVVTTSTRTWALPTYNNHLYKQISSQSGASNDNHYFGYSTPWGYFDFNRFHCHFSPRDWQRLINNNWGFRPKRLNFKLFNIQVKEVTQNDGTTTIANNLTSTVQVFTDLEYQLPYVLGSAHQGCLPPFPADVFMVPQYGYLTLNNGSQAVGRSSFYCLEYFPSQMLRTGNNFTFSYTFEDVPFHSSYAHSQSLDRLMNPLIDQYLYYLSRTNTPSGTTTQSRLQFSQAGASDIRDQSRNWLPGPCYRQQRVSKTAADNNNSEYSWTGATKYHLNGRDSLVNPGPAMASHKDDEEKFFPQSGVLIFGKQGSEKTNVDIEKVMITDEEEIRTTNPVATEQYGSVSTNLQSGNTQAATSDVNTQGVLPGMVWQDRDVYLQGPIWAKIPHTDGHFHPSPLMGGFGLKHPPPQILIKNTPVPANPSTTFSAAKFASFITQYSTGQVSVEIEWELQKENSKRWNPEIQYTSNYNKSVNVDFTVDTNGVYSEPRPIGTRYLTRNL

SEQ ID NO: 1352 - protein, 734 aa, synthetic construct
  REGION 1..734: note = Synthetic
MAADGYLPDWLEDTLSEGIRQWWKLKPGPPPKPAERHKDDSRGLVLPGYKYLGPFNGLDKGEPVNEADAAALEHDKAYDRQLDSGDNPYLKYNHADAEFQERLKEDTSFGGNLGRAVFQAKKRVLEPLGLVEEPVKTAPGKKRPVEHSPVEPDSSSGTGKAGNQPARKRLNFGQTGDADSVPDPQPLGQPPAAPSGLGTNTMATGSGAPMADNNEGADGVGNSSGDWHCDSTWMGDRVITTSTRTWALPTYNNHLYKQISSQSGASNDNHYFGYSTPWGYFDFNRFHCHFSPRDWQRLINNNWGFRPKRLNLKLFNIQVKEVTQNDGTTTIANNLTSTVQVFTDLEYQLPYVLGSAHQGCLPPFPADVFMVPQYGYLTLNNGSQAVGRSSFYCLEYFPSQMLRTGNNFTFSYTFEDVPFHSSYAHSQSLDRLMNPLIDQYLYYLSRTNTPSGTTTQSRLQFSQAGASDIRDQSRNWLPGPCYRQQRVSKTAADNNNGEYSWTGATKYHLNGRDSLVNPGPAMASHKDDEEKFFPQSGVLIFGKQGSEKTNVDIEKVMITDEEEIRTTNPVATEQYGSVSTNLQSGNTRAATSDVNTQGVLPGMVWQDRDVYLQGPIWAKIPHTDGHFHPSPLMGGFGLKHPPPQILIKNTPVPANPSTTFSAAKFASFITQYSTGQVSVEIEWELQKENSKRWNPEIQYTSNYNKSVNVDFTVDTNGVYSEPRPIGTRYLTRNL

SEQ ID NO: 1353 - protein, 735 aa, synthetic construct
  REGION 1..735: note = Synthetic
MAADGYLPDWLEDTLSEGIRQWWKLKPGPPPPKPAERHKDDSRGLVLPGYKYLGPFNGLDKGEPVNEADAAALEHDKAYDRQLDSGDNPYLKYDHADAEFQERLKEDTSFGGNLGRAVFQAKKRVLEPLGLVEEPVKTAPGKKRPVEHSPVEPDSSSGTGKAGNQPARKRLNFGQTGDADSVPDPQPLGQPPAAPSGLGTNTMATGSGAPMADNNDGADGVGNSSGNWHCDSTWMGDRVITTSTRTWALPTYNNHLYKQISSQSGASNDNHYFGYSTPWGYFDFNRFHCHFSPRDWQRLINNNWGFRPKRLNFKLFNIQVREVTQNDGTTTIANNLTSTVQVFTDSEYQLPYVLGSAHQGCLPPFPADVFMVPQYGYLTLNNGSQAVGRSSFYCLEYFPSQMLRTGNNFTFSYTFEDVPFHSSYAHSQSLDRLMNPLIDQYLYYLSRTNTPSGTTTQSRLQFSQAGASDIRDQSRNWLPGPCYRQQRVSKTSADNNNSEYSWIGATKYHLNGRDSLVNPGPAMASHKDDEEKFFPQSGVLIFGKQGSEKTNVDIEKVMITDEEEIRTTNPVATEQYGSVSTNLQSGNTQASTADVNTQGVLPGMVWQDRDVYLQGPIWAKIPHTDGHFHPSPLMGGFGLKHPPPQILIKNTPVPANPSTTFSAAKFASFITQYSTGRVSVEIEWELQKENSKRWNPEIQYTSNYNKSVNVDFTVDTNGVYSEPRPIGTRYLTRNL

SEQ ID NO: 1354 - protein, 735 aa, synthetic construct
  REGION 1..735: note = Synthetic
MAADGYLPDWLEDTLSEGIRQWWKLKPGPPPPKPAERHKDDSRGLVLPGYKYLGPFNGLDKGEPVNEADAAALEHDKAYDRQLDSGDNPYPKYNHADAEFQERLKEDTSFGGNLGRAVFQAKKRVLEPLGLVEEPVKTAPGKKRPVEHSPAEPDSSSGTGKAGQQPARKRLNFGQTGDADSVPDPQPLGQPPAAPSGLGTNTMATGSGAPMADNNEGADGVGNSSGNWHCDSTWMGDRVITTSTRTWALPTYNNHLYKQISSQSGASNDNHYFGYSTPWGYFDFNRFHCHFSPRDWQRLINNNWGFRPKRLNFKLFNIQVKEVTQNDGTTTIANNLTSTVQVFTDSEYQLPYVLGSAHQGCLPPFPADVFMVPQYGYLTLNNGSQAVGRSSFYCLEYFPSQMLRTGNNFTFSYTFEDVPFHSSYAHSQSLDRLMNPLIDQYLYYLSRTNTPSGTTTQSRLQFSQAGASDIRDQSRNWLPGPCYRQQRVSKTSADNNNSEYSWTGATKYHLNGRDSLVNPGPAMASHKDDEEKFFPQSGVLIFGKQDSGKTNVDIEKVMITDEEEIRTTNPVATEQYGSVSTNLQSGNTQAATSDVNTQGVLPGMVWQDRDVYLQGPIWAKIPHTDGHFHPSPLMGGFGLKHPPPQILIKNTPVPANPSTTFSAAKFASFITQYSTGQVSVEIEWELQKENSKRWNPEIQYTSNYNKSVNVDFTVDTNGVYSEPRPIGTRYLTRNL

SEQ ID NO: 1355 - protein, 735 aa, synthetic construct
  REGION 1..735: note = Synthetic
MAADGYLPDWLEDTLSEGIRQWWKLKPGPPPPKPAERHKDDSRGLVLPGYKYLGPFNGLDKGEPVNEADAAALEHDKAYDRQLDGGDNPYLKYNHADAEFQERLKEDTSFGGNLGRAVFQAKKRVLEPLGLVEEPVKTAPGKKRPVEHSLAEPDSSSGTGKAGQQPARRRLNFGQTGDADSVPDPQPLGQPPAAPSGLGTNTMATGSGAPMADNNEGADGVGNSSGNWHCDSTWMGDRVITTSTRTWALPTYNNHLYRQISSQSGASNDNHYFGYSTPWGYFDFNRFHCHFSPRDWQRLINNNWGSRPKRLNFKLFNIQVKEVTQNDGTTTIANNLTSTVQVFTDSEYQLPYVLGSAHQGCLPPFPADVFMVPQYGYLTLNNGSQAVGRSSFYCLEYFPSQMLRTGNNFTFSYTFEDVPFHSSYAHSQSLDRLMNPLVDQYLYYLSRTNTPSGTTTQSRLQFSQAGASDIRDQSRNWLPGPCYRQQRVSKTSADNNNSEYSWTGATKYHLNGRDSLVNPGPAMASHKDDEEKFFPQSGVLIFGKQDSGKTNVDIEKVMITDEEEIRTTNPVATEQYGSVSTNLQSGNTQAATSDVNTQGVLPGMVWQDRDVYLQGPIWAKIPHTDGHFHPSPLMGGFGLKHPPPQILIKNTPVPANPSTTFSAAKFASFITQYSTGQVSVEIEWELQKENSKRWNPEIQYTSNYNKSVNVDFTVDTNGVYSEPRPIGTRYLTRNL

SEQ ID NO: 1356 - protein, 738 aa, synthetic construct
  REGION 1..738: note = Synthetic
MAADGYLPDWLEDNLSEGIREWWDLKPGAPKPKANQQKQDDGRGLVLPGYKYLGPFNGLDKGEPVNAADAAALEHDKAYDQQLKAGDNPYLRYNHADAEFQERLQEDTSFGGNLGRAVFQAKKRVLEPLGLVEEAAKTAPGKKRPVEPSPQRSPDSSAGIGKKGQQPAKKRLNFGQTGDSESVPDPQPIGEPPAGPSGLGSGTMAAGGGAPMADNNEGADGVGSSSGNWHCDSTWLGDRVITTSTRTWALPTYNNHLYKQISNGTSGGSTNDNTYFGYSTPWGYFDFNRFHCHFSPRDWQRLINNNWGFRPKRLSFKLFNIQVKEVTQNEGTETIANNLTSTIQVFTDSEYQLPYVLGSAHQGCLPPFPADVFMIPQYGYLTLNNGSQAVGRSSFYCLEYFPSQMLRTGNNFEFSYTFEDVPFHSSCAHSQSSDRLMNPLIDQYLYYLSRTRSTGGTQGTQQLLFSQAGPANMSAQAKNWLPGPCYRQQRVSTTLSQNNNSNFAWTGATKYHLNGRDSLVNPGVAMATHKDDEERFFPSSGVLMFGKQGAGRDNVDYSSVMLTSEEEIKTTNPVATEQYGVVADNLQQTNTGPIVGNVNSQGALPGMVWQNRDVYLQGPIWAKIPHTDGNFHPSPLMGGFGLKHPPPQILIKNTPVPADPPTTFSQAKLASFITQYSTGQVSVEIEWELQKENSKRWNPEIQYTSNYYKSTNVDFAVNTEGTYSEPRPIGTRYLTRNL

SEQ ID NO: 1357 - protein, 738 aa, synthetic construct
  REGION 1..738: note = Synthetic
MAADGYLPDWLEDNLSEGIREWWDLKPGAPKPKANQQKQDDGRGLVLLGYKYLGPFNGLDKGEPVNAADAAALEHDKAYDQQLKAGDNPYLRYNHADAEFQERLQEDTSFGGNLGRAVFQAKKRVLEPLGLVEEAAKTAPGKKRPVEPSPQRSPDSSTGIGKKGQQPAKKRLNFGQTGDSESVPDPQPIGEPPAGPSGLGSGTMAAGGGAPMADNNEGADGVGSSSGNWHCDSTWLGDRVITTSTRTWALPTYNNHLYKQISNGTSGGSTNDNTYFGYSTPWGYFDFNRFHCHFSPRDWQRLINNNWGFRPKRLSFKLFNIQVKEVTQNEGTKTIANNLTSTIQVFTDSEYQLPYVLGSAHQGCLPPFPADVFMIPQYGYLTLNNGSQAVGRSSFYCLEYFPSQMLRTGNNFEFSYTFEDVPFHSGYAHSQSLDRLMNPLIDQYLYYLSRTQSTGGTQGTQQLLFSQAGPANMSAQAKNWLPGPCYRQQRVSTTLSQNNNSNFAWTGATKYHLNGRDSLVNPGVAMATHKDDEERFFPSSGVLMFGKQGAGRDNVDYSSVMLTSEEEIKTTNPVATEQYGVVADNLQQTNTGPIVGNVNSQGALPGMVWQNRDVYLQGPIWAKIPHTDGNFHPSPLMGGFGLKHPPPQILIKNTPVPADPPTTFSQAKLASFITQYSTGQVSVEIEWELQKENSKRWNPEIQYTSNYYKSTNVDFAVNTEGTYSEPRPIGTRYLTRNL

SEQ ID NO: 1358 - protein, 608 aa, synthetic construct
  REGION 1..608: note = Synthetic
MAPGKKRPVEQSPQEPDSSAGIGKSGAQPAKKRLNFGQTGDTESVPDPQPIGEPPAAPSGVGSLTMASGGGAPVADNNEGADGVGSSSGNWHCDSQWLGDRVITTSTRTWALPTYNNHLYKQISNSTSGGSSNDNAYFGYSTPWGYFDFNRFHCHFSPRDWQRLINNNWGFRPKRLNFKLFNIQVKEVTDNNGVKTIANNLTSTVQVFTDSDYQLPYVLGSAHEGCLPPFPADVFMIPQYGYLTLNDGSQAVGRSSFYCLEYFPSQMLRTGNNFQFSYEFENVPFHSSYAHSQSLDRLMNPLIDQYLYYLSKTINGSGQNQQTLKFSVAGPSNMAVQGRNYIPGPSYRQQRVSTTVTQNNNSEFAWAAASSWALNGRNSLMNPGPAMASHKEGEDRFFPLSGSLIFGKQGTGRDNVDADKVMITNEEEIKTTNPVATESYGQVATNHQGQSGRGDLGLSAQAAQTGWVQNQGILPGMVWQDRDVYLQGPIWAKIPHTDGNFHPSPLMGGFGMKHPPPQILIKNTPVPADPPTAFNKDKLNSFITQYSTGQVSVEIEWELQKENSKRWNPEIQYTSNYYKSNNVEFAVNTEGVYSEPRPIGTRYLTRNL

SEQ ID NO: 1359 - protein, 608 aa, synthetic construct
  REGION 1..608: note = Synthetic
MAPGKKRPVEQSPQEPDSSAGIGKSGAQPAKKRLNFGQTGDTESVPDPQPIGEPPAAPSGVGSLTMASGGGAPVADNNEGADGVGSSSGNWHCDSQWLGDRVITTSTRTWALPTYNNHLYKQISNSTSGGSSNDNAYFGYSTPWGYFDFNRFHCHFSPRDWQRLINNNWGFRPKRLNFKLFNIQVKEVTDNNGVKTIANNLTSTVQVFTDSDYQLPYVLGSAHEGCLPPFPADVFMIPQYGYLTLNDGSQAVGRSSFYCLEYFPSQMLRTGNNFQFSYEFENVPFHSSYAHSQSLDRLMNPLIDQYLYYLSKTINGSGQNQQTLKFSVAGPSNMAVQGRNYIPGPSYRQQRVSTTVTQNNNSEFAWPGASSWALNGRNSLMNPGPAMASHKEGEDRFFPLSGSLIFGKQGTGRDNVDADKVMITNEEEIKTTNPVATESYGQVATNHQSGQSGRGDLGLSAQAATGWVQNQGILPGMVWQDRDVYLQGPIWAKIPHTDGNFHPSPLMGGFGMKHPPPQILIKNTPVPADPPTAFNKDKLNSFITQYSTGQVSVEIEWELQKENSKRWNPEIQYTSNYYKSNNVEFAVNTEGVYSEPRPIGTRYLTRNL

SEQ ID NO: 1360 - protein, 608 aa, synthetic construct
  REGION 1..608: note = Synthetic
MAPGKKRPVEQSPQEPDSSAGIGKSGAQPAKKRLNFGQTGDTESVPDPQPIGEPPAAPSGVGSLTMASGGGAPVADNNEGADGVGSSSGNWHCDSQWLGDRVITTSTRTWALPTYNNHLYKQISNSTSGGSSNDNAYFGYSTPWGYFDFNRFHCHFSPRDWQRLINNNWGFRPKRLNFKLFNIQVKEVTDNNGVKTIANNLTSTVQVFTDSDYQLPYVLGSAHEGCLPPFPADVFMIPQYGYLTLNDGSQAVGRSSFYCLEYFPSQMLRTGNNFQFSYEFENVPFHSSYAHSQSLDRLMNPLIDQYLYYLSKTINGSGQNQQTLKFSVAGPSNMAVQGRNYIPGPSYRQQRVSTTVTQNNNSEFAWPGASSWALNGRNSLMNPGPAMASHKEGEDRFFPLSGSLIFGKQGTGRDNVDADKVMITNEEEIKTTNPVATESYGQVATNHQGQSGRGDAVGVAQAAQTGWVQNQGILPGMVWQDRDVYLQGPIWAKIPHTDGNFHPSPLMGGFGMKHPPPQILIKNTPVPADPPTAFNKDKLNSFITQYSTGQVSVEIEWELQKENSKRWNPEIQYTSNYYKSNNVEFAVNTEGVYSEPRPIGTRYLTRNL

SEQ ID NO: 1361 - protein, 608 aa, synthetic construct
  REGION 1..608: note = Synthetic
MAPGKKRPVEQSPQEPDSSAGIGKSGAQPAKKRLNFGQTGDTESVPDPQPIGEPPAAPSGVGSLTMASGGGAPVADNNEGADGVGSSSGNWHCDSQWLGDRVITTSTRTWALPTYNNHLYKQISNSTSGGSSNDNAYFGYSTPWGYFDFNRFHCHFSPRDWQRLINNNWGFRPKRLNFKLFNIQVKEVTDNNGVKTIANNLTSTVQVFTDSDYQLPYVLGSAHEGCLPPFPADVFMIPQYGYLTLNDGSQAVGRSSFYCLEYFPSQMLRTGNNFQFSYEFENVPFHSSYAHSQSLDRLMNPLIDQYLYYLSKTINGSGQNQQTLKFSVAGPSNMAVQGRNYIPGPSYRQQRVSTTVTQNNNSEFAWAAASSWALNGRNSLMNPGPAMASHKEGEDRFFPLSGSLIFGKQGTGRDNVDADKVMITNEEEIKTTNPVATESYGQVATNHQGQSGRGDAVGVAQAAQTGWVQNQGILPGMVWQDRDVYLQGPIWAKIPHTDGNFHPSPLMGGFGMKHPPPQILIKNTPVPADPPTAFNKDKLNSFITQYSTGQVSVEIEWELQKENSKRWNPEIQYTSNYYKSNNVEFAVNTEGVYSEPRPIGTRYLTRNL

SEQ ID NO: 1362 - protein, 608 aa, synthetic construct
  REGION 1..608: note = Synthetic
MAPGKKRPVEQSPQEPDSSAGIGKSGAQPAKKRLNFGQTGDTESVPDPQPIGEPPAAPSGVGSLTMASGGGAPVADNNEGADGVGSSSGNWHCDSQWLGDRVITTSTRTWALPTYNNHLYKQISNSTSGGSSNDNAYFGYSTPWGYFDFNRFHCHFSPRDWQRLINNNWGFRPKRLNFKLFNIQVKEVTDNNGVKTIANNLTSTVQVFTDSDYQLPYVLGSAHEGCLPPFPADVFMIPQYGYLTLNDGSQAVGRSSFYCLEYFPSQMLRTGNNFQFSYEFENVPFHSSYAHSQSLDRLMNPLIDQYLYYLSKTINGSGQNQQTLKFSVAGPSNMAVQGRNYIPGPSYRQQRVSTTVTQNNNSEFAWAAASSWALNGRNSLMNPGPAMASHKEGEDRFFPLSGSLIFGKQGTGRDNVDADKVMITNEEEIKTTNPVATESYGQVATNHQSGQSGRGDAVGVAQAATGWVQNQGILPGMVWQDRDVYLQGPIWAKIPHTDGNFHPSPLMGGFGMKHPPPQILIKNTPVPADPPTAFNKDKLNSFITQYSTGQVSVEIEWELQKENSKRWNPEIQYTSNYYKSNNVEFAVNTEGVYSEPRPIGTRYLTRNL

SEQ ID NO: 1363 - protein, 607 aa, synthetic construct
  REGION 1..607: note = Synthetic
MAPGKKRPVEQSPQEPDSSAGIGKSGAQPAKKRLNFGQTGDTESVPDPQPIGEPPAAPSGVGSLTMASGGGAPVADNNEGADGVGNASGNWHCDSQWLGDRVITTSTRTWALPTYNNHLYKQISSASTGATNDNTYFGYSTPWGYFDFNRFHCHFSPRDWQRLINNNWGFRPKRLNFKLFNIQVKEVTDNNGVKTIANNLTSTVQVFTDSDYQLPYVLGSAHEGCLPPFPADVFMIPQYGYLTLNDGSQAVGRSSFYCLEYFPSQMLRTGNNFQFSYEFENVPFHSSYAHSQSLDRLMNPLIDQYLYYLSKTINGSGQNQQTLKFSVAGPSNMAVQGRNYIPGPSYRQQRVSTTVTQNNNSEFAWPGASSWALNGRNSLMNPGPAMASHKEGEDRFFPLSGSLIFGKQGTGRDNVDADKVMITNEEEIKTTNPVATESYGQVATNHQGQSGRGDLGLSAQAAQTGWVQNQGILPGMVWQDRDVYLQGPIWAKIPHTDGNFHPSPLMGGFGMKHPPPQILIKNTPVPADPPTAFNKDKLNSFITQYSTGQVSVEIEWELQKENSKRWNPEIQYTSNYYKSNNVEFAVNTEGVYSEPRPIGTRYLTRNL

SEQ ID NO: 1364 - protein, 609 aa, synthetic construct
  REGION 1..609: note = Synthetic
MAPGKKRPVEPSPQRSPDSSTGIGKTGQQPAKKRLNFGQTGDTESVPDPQPIGEPPAAPAAVGPTTMASGGGAPMADNNEGADGVGNASGNWHCDSTWLGDRVITTSTRTWALPTYNNHLYKQISNGTSGGATNDNTYFGYSTPWGYFDFNRFHCHFSPRDWQRLINNNWGFRPKRLNFKLFNIQVKEVTDNNGVKTIANNLTSTVQVFTDSDYQLPYVLGSAHEGCLPPFPADVFMIPQYGYLTLNDGSQAVGRSSFYCLEYFPSQMLRTGNNFQFSYEFENVPFHSSYAHSQSLDRLMNPLIDQYLYYLSKTINGSGQNQQTLKFSVAGPSNMAVQGRNYIPGPSYRQQRVSTTVTQNNNSEFAWPGASSWALNGRNSLMNPGPAMASHKEGEDRFFPLSGSLIFGKQGTGRDNVDADKVMITNEEEIKTTNPVATESYGQVATNHQGQSGRGDLGLSAQAAQTGWVQNQGILPGMVWQDRDVYLQGPIWAKIPHTDGNFHPSPLMGGFGMKHPPPQILIKNTPVPADPPTAFNKDKLNSFITQYSTGQVSVEIEWELQKENSKRWNPEIQYTSNYYKSNNVEFAVNTEGVYSEPRPIGTRYLTRNL

SEQ ID NO: 1365 - protein, 608 aa, synthetic construct
  REGION 1..608: note = Synthetic
MAPGKKRPVEQSPQEPDSSSGIVKTGQQPAKKRLNFGQTGDTESVPDPQPLGEPPATPSGVGSLTMASGGGAPMADNNEGADGVGNASGNWHCDSTWLGDRVITTSTRTWALPTYNNHLYKQISNGTSGGATNDNAYFGYSTPWGYFDFNRFHCHFSPRDWQRLINNNWGFRPKRLNFKLFNIQVKEVTDNNGVKTIANNLTSTVQVFTDSDYQLPYVLGSAHEGCLPPFPADVFMIPQYGYLTLNDGSQAVGRSSFYCLEYFPSQMLRTGNNFQFSYEFENVPFHSSYAHSQSLDRLMNPLIDQYLYYLSKTINGSGQNQQTLKFSVAGPSNMAVQGRNYIPGPSYRQQRVSTTVTQNNNSEFAWPGASSWALNGRNSLMNPGPAMASHKEGEDRFFPLSGSLIFGKQGTGRDNVDADKVMITNEEEIKTTNPVATESYGQVATNHQGQSGRGDLGLSAQAAQTGWVQNQGILPGMVWQDRDVYLQGPIWAKIPHTDGNFHPSPLMGGFGMKHPPPQILIKNTPVPADPPTAFNKDKLNSFITQYSTGQVSVEIEWELQKENSKRWNPEIQYTSNYYKSNNVEFAVNTEGVYSEPRPIGTRYLTRNL

SEQ ID NO: 1366 - protein, 608 aa, synthetic construct
  REGION 1..608: note = Synthetic
MAPGKKRPVEQSPQEPDSSSGIGKTGQQPAKKRLNFGQTGDSESVPDPQPLGEPPATPAAVGPTTMASGGGAPVADNNEGADGVGSSSGNWHCDSQWLGDRVITTSTRTWALPTYNNHLYKQISNSTSGGSSNDNAYFGYSTPWGYFDFNRFHCHFSPRDWQRLINNNWGFRPKRLNFKLFNIQVKEVTDNNGVKTIANNLTSTVQVFTDSDYQLPYVLGSAHEGCLPPFPADVFMIPQYGYLTLNDGSQAVGRSSFYCLEYFPSQMLRTGNNFQFSYEFENVPFHSSYAHSQSLDRLMNPLIDQYLYYLSKTINGSGQNQQTLKFSVAGPSNMAVQGRNYIPGPSYRQQRVSTTVTQNNNSEFAWPGASSWALNGRNSLMNPGPAMASHKEGEDRFFPLSGSLIFGKQGTGRDNVDADKVMITNEEEIKTTNPVATESYGQVATNHQGQSGRGDLGLSAQAAQTGWVQNQGILPGMVWQDRDVYLQGPIWAKIPHTDGNFHPSPLMGGFGLKHPPPQILIKNTPVPADPPAEFSATKFASFITQYSTGQVSVEIEWELQKENSKRWNPEVQYTSNYAKSANVDFTVDNNGLYTEPRPIGTRYLTRPL

SEQ ID NO: 1367 - protein, 601 aa, synthetic construct
  REGION 1..601: note = Synthetic
MAPGKKRPVEPSPQRSPDSSTGIGKTGQQPAKKRLNFGQTGDSESVPDPQPIGEPPAGPSGLGSGTMAAGGGAPMADNNEGADGVGSSSGNWHCDSAWLGDRVITTSTRPWALPTYNNHLYKQISNGTSGGSTNDNTYFGYSTPWGYFDFNRFHCHFSPRDWQRLINNNWGFRPKRLNFKLFNIQVKEVTQNEGTKTIANNLTSTIQVFTDSEYQLPYVLGSAHQGCPPPFPADVFMIPQYGYLTLNNGSQAVGRSSFYCLEYFPSQMRRTGNNFEFSYQFEDVPFHSSYAHSQSLDRLMNPLIDQYLYYLSRTQSTGGTAGTQQLLFSQAGPNNMSAQAKNWLPGPCYRQQRVSTTLSQNNNSNFAWTGATKYHLNGRDSLVNPGVAMATHKDDEERFFPSSGVLMFGKQGAGKDNVDYSSVMLTSEEEIKTTNPVATEQYGVVADNLQQQNAAPIVGAVNSQGALPGMVWQNRDVYLQGPIWAKIPHTDGNFHPSPLMGGFGLKHPPPQILIKNTPVPADPPTTFSQAKLASFITQYSTGQVSVEIEWELQKENSKRWNPEIQYTSNYYKSTNVDFAVNTEGTYSEPRPIGTRYLTRNL

SEQ ID NO: 1368 - protein, 601 aa, synthetic construct; identical to SEQ ID NO: 1367
  REGION 1..601: note = Synthetic

SEQ ID NO: 1369 - protein, 601 aa, synthetic construct
  REGION 1..601: note = Synthetic
MAPGKKRPVEPSPQRSPDSSTGIGKKGQQPAKKRLNFGQTGDSESVPDPQPIGEPPAGPSGLGSGTMAAGGGAPMADNNEGADGVGSSSGNWHCDSTWLGDRVITTSTRTWALPTYNNHLYKQISNGTSGGSTNDNTYFGYSTPWGYFDFNRFHCHFSPRDWQRLINNNWGFRPKRLSFKLFNIQVKEVTQNEGTKTIANNLTSTIQVFTDSEYQLPYVLGSAHQGCLPPFPADVFMIPQYGYLTLNNGSQAVGRSSFYCLEYFPSQMLRTGNNFEFSYTFEDVPFHSSYAHSQSLDRLMNPLIDQYLYYLSRTQSTGGTQGTQQLLFSQAGPANMSAQAKNWLPGPCYRQQRVSTTLSQSNNSNFAWTGATKYHLNGRDSLVNPGVAMATHKDDEERFFPSSGVLMFGKQGAGRDNVDYSSVMLTSEEEIKTTNPVATEQYGVVADNLQQTNTGPIVGNVNSQGALPGMVWQNRDVYLQGPIWAKIPHTDGNFHPSPLMGGLGLKHPPPQILIKNTPVPADPPTTFSQAKLASFITQYSTGQVSVEIEWELQKENSKRWNPEIQYTSNYYKSTNVDFAVNTEGTYSEPRPIGTRYLTRNL

SEQ ID NO: 1370 - protein, 601 aa, synthetic construct
  REGION 1..601: note = Synthetic
MAPGKKRPVEPSPQRSPDSSTGIGKKGQRPAKKRLNFGQTGDSESVPDPQPIGEPPAGPSGLGSGTMAAGGGAPMADNNEGADGVGSSSGNWHCDSTWLGDRVITTSTRTWALPTYNNHLYKQISNGTSGGSTNDNTYFGYSTPWGYFDFNRFHCHFSPRDWQRLINNNWGFRPKRLSFKPFNIQVKEVTQNEGTKTIANNLTSTIQVFTDSEYQLPYVLGSAHQGCLPPFPADVFMIPQYGYLTLNNGSQAVGRSSFYCLEYFPSQMLRTGNNFEFSYTFEDVPFHSSYAHSQSLDRLMNPLIDQYLHYLSRTQSTGGTQGTQQLLFSQAGPANMSAQAKNWLPGPCYRQQRVSTTLSQNNNSNFAWTGATKYHLNGRDSLVNPGVAMATHKDDEERFFPSSGVLMFGKQGAGRDNVDYSSVMLTSEEEIKTTNPVATEQYGVVADNLQQTNTGPIVGNVNSQGALPGMVWQNRDVYLQGPIWAKIPHTDGNFHPSPLMGGFGLKHPPPQILIKNTPVPADPPTTFSQAKLASFITQYSTGQVSVEIEWELQKENSKRWNPEIQYTSNYYKSTNVDFAVNTEGTYSEPRPIGTRYLTRNL

SEQ ID NO: 1371 - protein, 601 aa, synthetic construct
  REGION 1..601: note = Synthetic
MAPGKKRPVEPSPQRSPDSSTGIGKKGQQPAKKRLSFGQTGDSESVPDPQPIGEPPAGPSGLGSGTMAAGGGAPMADNNEGADGVGSSSGNWHCDSTWLGDRVITTSTRTWALPTYNNHLYKQISNGTSGGSTNDNTYFGYSTPWGYFDFNRFHCHFSPRDWQRLINNNWGFRPKRLSFKLFNIQVKEVTQNEGTKTIANNLTSTIQVFTDSEYQLPYVLGSAHQGCLPPFPADVFMIPQYGYLTLNNGSQAVGRSSFYCLEYFPSQMLRTGNNSEFSYTFEDVPFHSSYAHSQSLDRLMNPLIDQYLYYLSRTQSTGGTQGTQQLLFSQAGPANMSAQAKNWLPGPCYRQQRVSTTLSQNNNSNFAWTGATKYHLNGRDSLVNPGVAMATHKDDEERFFPSSGVLMFGKQGAGRDNVDYSSVMLTSEEEIKTTNPVATEQYGVVADNLQQTNTGPIVGNVNSQGALPGMVWQNRDVYLQGPIWAKIPHTDGNFHPSPLMGGFGLKHPPPQILIKNTPVPADPPTTFSQAKLASFITQYSTGQVSVEIEWELQKENSKRWNPEIQYTSNYYKSTNVDFAVNTEGTYSEPRPIGTRYLTRNL

SEQ ID NO: 1372 - protein, 601 aa, synthetic construct
  REGION 1..601: note = Synthetic
MAPGKKRPVEPSPQRSPDSSTGIGKKGQQPAKKRLNFGQTGDSESVPDPQPIGEPPAGPSGLGSGTMAAGGGAPMADNNEGADGVGSSSGNWHCDSTWLGDRVITTSTRTWALPTYNNHLYKQISNGTSGGSTNDNTYFGYSTPWGYFDFNRFHCHFSPRDWQRLINNNWGFRPKRLSFKLFNIQVKEVTQNEGTKTIANNLTSTIQVFTDSEYQLPYVLGSAHQGCLPPFPADVFMIPQYGYLTLNNGSQAVGRSSFYCLEYFPSQMLRTGNNFEFSYTFEDVPFHSSYAHSQSLDRLMNPLIDQYLYYLSRTQSTGGTQGTQQLLFSQAGPANMSAQAKNWLPGPCYRQQRVSTTLSQNNNSNFAWTGATKYHLNGRDSLVNPGVAMATHKDDEERFFPSSGVLMFGKQGAGRDNVDYSSVMLTSEEEIKTTNPVATEQYGVVADNLQQTNTGPIVGNVNSQGALPGMVWQNRDVYLQGPIWAKIPHTDGNFHPSPLMGGFGLKHPPPQILIKNTPVPADPPTTFSQAKLASFITQYSTGQVSVEIEWELQKENSKRWNPEIQYTSNYYKSTNVDFAVNTEGTYSEPRPIGTRYLTRNL

SEQ ID NO: 1373 - protein, 601 aa, synthetic construct; identical to SEQ ID NO: 1372
  REGION 1..601: note = Synthetic

SEQ ID NO: 1374 - protein, 601 aa, synthetic construct; identical to SEQ ID NO: 1372
  REGION 1..601: note = Synthetic

SEQ ID NO: 1375 - protein, 601 aa, synthetic construct
  REGION 1..601: note = Synthetic
MAPGKKRPVEPPPQRSPDSSTGIGKKGQQPAKKRLNFGQTGDSESVPDPQPIGEPPAGPSGLGSGTMAAGGGAPMADNNEGADGVGSSSGNWHCDSTWLGDRVITTSTRTWALPTYNNHLYKQISNGTSGGSTNDNTYFGYSTPWGYFDFNRFHCHFSPRDWQRLINNNWGFRPKRLSFKLFNIQVKEVTQNEGTKTVANNLTSTIQVFTDSEYQLPYVLGSAHQGCLPPFPADVFMIPQYGYLTLNNGSQAVGRSSFYCLEYFPSQMLRTGNNFEFSYTFEDVPFHSSYAHSQSLDRLMNPLIDQYLYYLSRTQSTGGTQGTQQLLFSQAGPANMSAQAKNWLPGPCYRQQRVSTTLSQNNNSNFAWTGATKYHLNGRDSLVNPGVAMATHKDDEERFFPSSGVLMFGKQGAGRDNVDYSSVMLTSEEEIKTTNPVATEQYGVVADNLQQTNTGPIVGNVNSQGALPGMVWQNRDVYLQGPIWAKIPHTDGNFHPSPLMGGFGLKHPPPQILIKNTPVPADPPTTFSQAKLASFITQYSTGQVSVEIEWELQKENSKRWNPEIQYTSNYYKSTNVDFAVNTEGTYSEPRPIGTRYLTRNL

SEQ ID NO: 1376 - protein, 601 aa, synthetic construct
  REGION 1..601: note = Synthetic
MAPGKKRPVEPSPQRSPDSSTGIGKKGQQPAKKRLNFGQTGDSESVPDPQPIGEPPAGPSGLGSGTMAAGGGAPMADNNEGADGVGSSSGNWHCDSTWLGDRVITTSTRTWALPTYNNHLYKQISNGTSGGSTNDNTYFGYSTPWGYFDFNRFHCHFSPRDWQRLINNNWGFRPKRLSFKLFNIQVKEVTQDEGTKTIANNLTSTIQVFTDSEYQLPYVLGSAHQGCLPPFPADVFMIPQYGYLTLNNGSQAVGRSSFYCLEYFPSQMLRTGNNFEFSYTFEDVPFHSSYAHSQSLDRLMNPLIDQYLYYLSRTQSTGGTQGTQQLLFSQAGPANMSARAKNWLPGPCYRQQRVSTTLSQNNNSNFAWTGATKYHLNGRDSLVNPGVAMATHKDDEERFFPSSGVLMFGKQGAGRDNVDYSSVMLTSEEEIKTTNPVATEQYGVVADNLQQANTGPIVGNVNSQGALPGMVWQNRDVYLQGPIWAKIPHTDGNFHPSPLMGGFGLKHPPPQILIKNTPVPADPPTTFSQAKLASFITQYSTGQVSVEIEWELQKENSKRWNPEIQYTSNYYKSTNVDFAVNSEGTYSEPRPIGTRYLTRNL

SEQ ID NO: 1377 - protein, 594 aa, synthetic construct
  REGION 1..594: note = Synthetic
MAPGKKRPVEPDSSSGIGKSGQQPAKKRLNFGQTGDSESVPDPQPLSEPPAGPSGLGSGTMAAGGGAPMADNNEGADGVGNVSGNWHCDSTWLGDRVITTSTRTWALPTYNNHLYKQISNGTSGGSSNDNTYFGYSTPWGYFDFNRFHCHFSPRDWQRLINNNWGFRPKKLNFKLFNIQVKEVTQNEGTKTIANNLTSTVQVFTDSEYQLPYVLGSAHQGCLPPFPADVFMIPQYGYLTLNNGSQAVGRSSFYCLEYFPSQMLRTGNNFTFSYTFEDVPFHSSYAHSQSLDRLMNPLIDQYLYYLSRTQTNGTNATQTLLFAQAGPQNMSAQAKNWLPGPCYRQQRVSTTVSQNNNSNFTWTGATKYHLNGRDSLVSPGVAMATHKDDEERFFPSSGVLMFGKQGAGKDNVEYTNVMLTSEEEIKTTNPVATEQYGVVADNLQQTNSAPIVGAVNSQGALPGMVWQNRDVYLQGPIWAKIPHTDGNFHPSPLMGGFGLKHPPPQILIKNTPVPADPPVNFTDAKLASFITQYSTGQVSVEIEWELQKENSKRWNPEIQYTSNYYKSANVDFAVNADGVYSEPRPIGTRYLTRNL

SEQ ID NO: 1378 - protein, 594 aa, synthetic construct
  REGION 1..594: note = Synthetic
MAPGKKRPVEPDSSSGIGKSGQQPAKKRLNFGPTGDSESVPDPQPLSEPPAGPSGLGSGTMAAGGGAPMADNNEGADGVGNVSGNWHCDSTWLGDRVITTSTRTWALPTYNNHLYKQISNGTSGGSSNDNTYFGYSTPWGYFDFNRFHCHFSPRDWQRLINNNWGFRPKKLNFKLFNIQVKEVTQNEGTKTTANNLTSTVQVFTDSEYQLPYVLGSAHQGCLPPFPADVFMIPQYGYLTLNNGSQAVGRSSFYCLEYFPSQMLRTGNNFTFSYTFEDVPFHSSYAHSQSLDRLMNPLIDQYLYYLSRTQTNGTNATQTLLFAQAGPQNMSAQAKNWLPGPCYRQQRVSTAVSQNNNSNFTWTGATKYHLNGRDSLVNPGVAMATHKDDEERFFPSSGVLMFGKQGAGKDNVEYTNVMLTSEEEIKTTNPVATEQYGVVADNLQQTNSAPIVGAVNSQGALPGMVWQNRDVYLQGPIWAKIPHTDGNFHPSPLMGGFGLKHPPPQILIKNTPVPADPPVNFTDAKLASFITQYSTGQVSVEIEWELQKENSKRWNPEIQYTSNYYKSANVDFAVNADGVYSEPRPIGTRYLTRNL

SEQ ID NO: 1379 - protein, 594 aa, synthetic construct
  REGION 1..594: note = Synthetic
MAPGKKRPVEPDSSSGIGKSGRQPAKKRLNFGQTGDSESVPDPQPLSEPPAGPSGLGSGTMAAGGGAPMADNNEGADGVGNASGNWHCDSTWLGDRVITTSTRTWALPTYNNHLYKQISNGTSGGSSNDNTYFGYSTPWGYFDFNRFHCHFSPRDWQRLINNNWGFRPKRLNFKLFNIQVKEVTQNEGTKTIANNLTSTVQVFTDSKYQLPYVLGSAHQGCLPPFPADVFMIPQYGYLTLNNGSQAVGRSSFYCLEYFPSQMLRTGNNFTFSYTFEDVPFHSSYAHSQSLDRLMNPLIDQYLYYLSRTQTNGTNATQTLLFAQAGPQNMSAQAKNWLPGPCYRQQRVSTTVSQNNNSNFTWTGATKYHLNGRDSLVNPGVAMATHKDDEERFFPSSGVLMFGKQGAGKDNVEYTNVMLTSEEEIKTTNPVATEQYGVVADNLQQTNSAPIVGAVNSQGALPGMVWQNRDVYLQGPIWAKIPHTDGNFHPSPLMGGFGLKHPPPQILIKNTPVPADPPVNFTDAKLASFITQYSTGQVSVEIEWELQKENSKRWNPEIQYTSNYYKSANVDFAVNADGVYSEPRPIGTRYLTRNL

SEQ ID NO: 1380 - protein, 601 aa, synthetic construct
  REGION 1..601: note = Synthetic
MAPGKKRPVEPSPQRSPDSSTGIGKKGQQPARKRLNFGQTGDSESVPDPQPIGEPPAAPSSVGSGTMAAGGGAPMADNNEGADGVGSSSGNWHCDSTWLGDRVITTSTRTWALPTYNNHLYKQISNGTSGGSTNDNTYFGYSTPWGYFDFNRFHCHFSPRDWQRLINNNWGFRPKRLSFKLFNIQVKEVTQNEGTKTIANSLTSTIQVFTDSEYQLPYVLGSAHQGCLPPFPADVFMIPQYGYLTPNNGSQAVGRSSFYCLEYFPSQMLRTGNNFSFSYTFEDVPFHSSYAHSQSLDRLMNPLIDQYLYYLSRTQSTGGTAGTQQLLSSQAGPSNMSAQARNWLPGPCYRQQRVSTTLSQNNNSNFAWTGATKYHLNGRDSLVNPGVAMATNKDDEDRFFPSSGILMFGKQGAGKDNVDYSNVMLTSEEEIKTTNPVATEQYGVVADNLQQQNTAPIVGAVNSQGALPGMVWQNRDVYLQGPIWAKIPHTDGNFHPSPLMGGFGLKHPPPQILIKNTPVPADPPTAFNQAKLNSFITQYSTGQVSVEIEWELQKENSKRWNPEIQYTSNYYKSTNVDFAVNTEGVYSEPRPIGTRYLTRNL

SEQ ID NO: 1381 - protein, 601 aa, synthetic construct
  REGION 1..601: note = Synthetic
MAPGKKRPVEPSPQRSPDSSTGIGKKGQQPARKRLNFGQTGDSESVPDPQPIGEPPAAPSSVGSGTMAAGGGAPMADNNEGADGVGSSSGNWHCDSTWLGDRVITTSTRTWALPTYNNHLYKQISNGTSGGSTNDNTYFGYSTPWGYFDFNRFHCHFSPRDWQRLINNNWGFRPKRLSFKLFNIQVKEVTQNEGTKTIANNLTSTIQVFTDSEYQLPYVLGSAHQGCLPPFPADVFMIPQYGYLTLNNGSQAVGRSSFYCLEYFPSQMLRTGNNFSFSYTFEDVPFHSSYVHSQSLDRLMNPLIDQYLYYLSRTQSTGGTAGTQQLLFSQAGPSNMSAQARNWLPGPCYRQQRVSTTLSQNNNSNFAWTGATKYHLNGRDSLVNSGVAMATNKDDEDRFFPSSGILMFGKQGAGKDNVDYSNVMLTSEEEIKTTNPVATEQYGVVADNLQQQNTAPIVGAVNSQGALPGMVWQNRDVYLQGPIWAKIPHTDGNFHPSPLMGGFGLKHPPPQILIKNTPVPADPPTAFNQAKLNSFITQYSTGQVSVEIEWELQKENSKRWNPEIQYTSNYYKSTNVDFAVNTEGVYSEPRPIGTRYPTRNL

SEQ ID NO: 1382 - protein, 601 aa, synthetic construct
  REGION 1..601: note = Synthetic
MAPGKKRPVEPSPQRSPDSSTGIGKKGQQPARKRLNFGQTGDSESVPDPQPIGEPPAAPSSVGSGTMAAGGGAPMADNNEGADGVGSSSGNWHCDSTWLGDRVITTSTRTWALPAYNNHLYKQISNGTSGGSTNDNTYFGYSTPWGYFDFNRFHCHFSPRDWQRLINNNWGFRPKRLSFKLFNIQVKEVTQNEGTKTIANNLTSTIQVFTDSEYQLPYVLGSAHQGCLPPFPADVFMIPQYGYLTLNNGSQAVGRSSFYCLEYFPSQMLRTGNNFSFSYTFEDVPFHSSYAHSQSLDRLMNPLIDQYLYYLSRTQSTGGTAGTQQLLFSQAGPSNMSAQARNWLPGPCYRQQRVSTTLSQNNNSNFAWTGATKYHLSGRDSLVNPGVAMATNKDDEDRFFPSSGILMFGKQGAGKDNVDYSNVMLTSEEEIKTTNPVATEQYGVVADNLQQQNTAPIVGAVNSQGALPGMVWQNRDVYLQGPIWAKIPHTDGNFHPSPLMGGFGLKHPPPQILIKNTPVPADPPTAFNQAKLNSSITQYSTGQVSVEIEWELQKENSKRWNPEIQYTSNYYKSTNVDFAVNTEGVYSEPRPIGTRYLTRNL

SEQ ID NO: 1383 - protein, 601 aa, synthetic construct
  REGION 1..601: note = Synthetic
MAPGKKRPVEPSPQRSPDSSTGIGKKGQQPARKRLNFGQTGDSESVPDPQPIGEPPAAPSSVGSGTMAAGGGAPMADNNEGADGVGSSSGNWHCDSTWLGDRVITTSTRTWALPTYNNHLYKQISNGTSGGSTNDNTYFGYSTPWGYFDFNRFHCHFSPRDWQRLINNNWGFRPKRLSFKLFNIQVKEVTQNEGTKTIANNLTSTIQVFTDSEYQLPYVLGSAHQGCLPPFPADVFMIPQYGYLTLNNGSQAVGRSSFYCLEYFPSQMLRTGNNFSFSYTFEDVPFHSSYAHSQSLDRLMNPLIDQYLYYLSRTQSTGGTAGTQQLLFSQAGPSNMSAQARNWLPGPCYRQQRVSTTLSQNNNSNFAWTGATKYHLNGRDSLVNPGVAMATNKDDEDRFFPSSGILMFGKQGAGKDNVDYSNVMLTSEEEIKTTNPVATEQYGVVADNLQQQNTAPIVGAVNSQGALPGMVWQNRDVYLQGPIWAKIPHTDGNFHPSPLMGGFGLKHPPPQILIKNTPVPADPPTAFNQAKLNSFITQYSTGQVSVEIVWELQKENSKRRNPEIQYTSNYYKSTNVDFAVNTEGVYSEPRPIGTRYLTRNL

SEQ ID NO: 1384 - protein, 601 aa, synthetic construct
  REGION 1..601: note = Synthetic
MAPGKKRPVEPSPQRSPDSSTGIGKKGQQPARKRLNFGQTGDSESVPDPQPIGEPPAAPSSVGSGTMAAGGGAPMADNNEGADGVGSSSGNWHCDSTWLGDRVITTSTRTWALPTYNNHLYKQISNGTSGGSTNDNTYFGYSTPWGYFDFNRFHCHFSPRDWQRLINNNWGFRPKRLSFKLFNIQVKEVTQNEGTKTIANNLTSTIQVFTDSEYQLPYVLGSAHQGCLPPFPADVFMIPQYGYLTLNNGSQAVGRSSFYCLEYFPSQMLRTGNNFSFSYTFEDVPFHSSYAHSQSLDRLMNPLIDQYLYYLSRTQSTGGTAGTQQLLFSQAGPSNMSAQARNWLPGPCYRQQRVSTTLSQNNNSNFAWTGATKYHLNGRDSLVNPGVAMATNKDDEDRFFPPSGILMFGKQGAGKDNVDYSNVMLTSEEEIKTTNPVATEQYGVVADNLQQQNTAPIVGAVNSQGALPGMVWQNRDVYLQGPIWAKIPHTDGNFHPSPLMGGFGLKHPPPQILIKNTPVPADPPTAFNQAKLNSFITQYSTGQVSVVIEWELQKENSKRWNPEIQYTSNYYKSTNVDFAVNTEGVYSELRPIGTRYLTRNL

SEQ ID NO: 1385 - protein, 601 aa, synthetic construct
  REGION 1..601: note = Synthetic
MAPGKKRPVEPSPQRSPDSSTGIGKKGQQPARKRLNFGQTGDSESVPDPQPIGEPPAAPSSVGSGTMAAGGGAPMADNNEGADGVGSSSGNWHCDSTWLGDRVITTSTRTWALPTYNNHLYKQISNGTSGGSTNDNTYFGYSTPWGYFDFNRFHCHFSPRDWQRLINNNWGFRPKRLSFKLFNIQVKEVTQNEGTKTIANNLTSTIQVFTDSEYQLPYVLGSAHQGCLPPFPADVFMIPQYGYLTLNNGSQAVGRSSFYCLEYFPSQMLRTGNNFSFSYTFEDVPFHSSYAHSQSLDRLMNPLIDQYLYYLSRTQSTGGTAGTQQLLFSQAGPSNMSAQARNWLPGPCYRQQRVSTTLSQNNNSNFAWTGATKYHLNGRDSLVNPGVAMATNKDDEDRFFPSSGILMFGKQGAGKDNVDYSNVMLTSEEEIKATNPVATEQYGVVADNLQQQNTAPIVGAVNSQGALPGMVWQNRDVYLQGPIWAKIPHTDGNFHPSPLMGGFGLKHPPPQILIKNTPVPADPPTAFNQAKLNSFITQYSTGQVSVEIEWELQKENSKRWNPEIQYTSNYYKSTNVDFAVNTEGVYSEPRPIGTRYLTRNL

SEQ ID NO: 1386 - protein, 601 aa, synthetic construct
  REGION 1..601: note = Synthetic
MAPGKKRPVEPSPQRSPDSSTGIGKKGQQPARKRLNFGRTGDSESVPDPQPIGEPPAAPSSVGSGTMAAGGGAPMADNNEGADGVGSSSGNWHCDSTWLGDRVITTSTRTWALPTYNNHLYKQISNGTSGGSTNDNTYFGYSTPWGYLDFNRFHCHFSPRDWQRLINNNWGFRPKRLSFKLFNIQVKEVTQNEGTKTIANNLASTIQVFTDSEYQPPYVLGSAHQGCLPPFPADVFMIPQYGYLTLNNGSQAVGRSSFYCLEYFPSQMLRTGNNFSFSYTFEDVPFHSSYAHSQSLDRLMNPLIDQYLYYLSRTQSTGGTAGTQQLLFSRAGPSNMSAQARNWLPGPCYRQQRVSTTLSQNNNSNFAWTGATKYHLNGRDSLVNPGVAMATNKDDEDRFFPSSGILMFGKQGAGKDNVDYSNVMLTSEEEIKTTNPVATEQYGVVADNLQQQNTAPTVGAVNSQGALPGMVWQNRDVYLQGPIWAKIPHTDGNFHPSPLMGGFGLKHPPPQILIKNTPVPADPPTAFNQAKLNSFIAQYSTGQVSVEIEWELQKENSKRWNPEIQYTSNYYKSTNADFAVNTEGVYSEPRPIGTRYLTRNL

SEQ ID NO: 1387 - protein, 601 aa, synthetic construct
  REGION 1..601: note = Synthetic
MAPGKKRPVEPSPQRSPDSSTGIGKKGQQPARKRLNFGQTGDSESVPDPQLIGEPPAAPSSVGSGTMAAGGGAPMADNNEGADGVGSSSGNWHCDSTWLGDRVITTSTRTWALPTYNNHLYKQISNGTSGGSTNDNTYFGYSTPWGYFDFNRFHCHFSPRDWQRLINNNWGFRPKRLSFKLFNIQVKEVTQNEGTKTIANNLTSTIQVFTDSEYQLPYVLGSAHQGCLPPFPADVFMIPQYGNLTLNNGSQAVGRSSFYCLEYFPSQMLRTGNNFSFSYTFEDVPFHSSYAHSQSLDRLMNPLIDQYLYYLSRTQSTGGTAGTQQLLFSQAGPSNMSAQARNWLPGPCYRQQRVSTTLSQNNNSNFAWTGATKYHLNGRDSLVNPGVAMATNKDDEDRFFPSSGILMFGKQGAGKDNMGYSNVMLTSEEEIKTTNPVATEQYGVVADNLQQQNTAPIVGAVNSQGALPGMVWQNRDVYLQGPIWAKIPHTDGNFHPSPLMGGFGLKHPPPQILIKNTPVPADPPTAFNQAKLNSFITQYGTGQVSVEIEWELQKENSKRWNPEIQYTSNYYKSTNVDFAVNTEGVYSEPRPIGTRYLTRNL

SEQ ID NO: 1388 - protein, 601 aa, synthetic construct
  REGION 1..601: note = Synthetic
MAPGKKRPVEPSPQRSPDSSTGIGKKGQQPARKRLNFGQTGDSESVPDPQPIGEPPAAPSSVGSGTMAAGGGAPMADNNEGADGVGSSSGNWHCDSTWLGDRVITTSTRTWALPTYNNHLYKQISNGTSGGSTNDNTYFGYSTPWGYFDFNRFHCHFSPRDWQRLINNNWGFRPKRLSFKLFNIQVKEVTQNEGTKTIANNLTSTIQVFTDSEYQLPYVLGSAHQGCQPPFPADVFMIPQYGYLTLNNGSQAVGRSSFYCLEYFPSQMLRTGNNFSFSYTFEDVPFHSSYAHSQSLDRLMNPLIDQYLYYLSRTQSTGGTAGTQQLLFSQAGPSNMSAQARNWLPGPCYRQQRVSTTLSQNNNSNFAWTGATKYHLNGRDSLVNPGVAMATNKDDEDRFFPSSGILMFGKQGAGKDNVDYSNVMLTSEEEIKTTNPVATEQYGVVADNLQQQNTAPIVGAVNSQGALPGMVWQNRDVYLQGPIWAKIPHTDGNFHPSPLMGGFGLKHPPPQILIKNTPVPADPPTAFNQAKLNSFITQYSTGQVSVEIEWEPQKENSKRWNPEIQYTSNYYKSTNVDFAVNTEGVYSEPRPIGTRYLTRNL

SEQ ID NO: 1389 - protein, 601 aa, synthetic construct
  REGION 1..601: note = Synthetic
MAPGKKRPVEPSPQRSPDSSTGIGKKGQQPARKRLNFGQTGDSESVPDPQPIGEPPAAPSSVGSGTMAAGGGAPMADNNEGADGVGSSSGNWHCDSTWLGDRVITTSTRTWALPTYNNHLYKQTSNGTSGGSTNDNTYFGYSTPWGYFDFNRFHCHFSPRDWQRLINNNWGFRPKRLSFKLFNIQVKEVTQNEGTKTIANNLTSTIQVFTDSEYQLPYVLGSAHQGCLPPFPADVFMIPQYGYLTLNNGSQAVGRSSFYCLEYFPSQMLRTGNNFSFSYTFEDVPFHSSYAHSQSLDRLMNPLIDQYLYYLSRTQSTGGTAGTQQLLFSQAGPSNMSAQARNWLPGPCYRQQRVSTTLSQNNNSNFAWTGATKYHLNGRDSLVNPGVAMATNKDDEDRFFPSSGILMFGKQGAGKDNVDYSNVMLTSEEEIKTTNPVATEQYGVVADNLQQQNTAPIVGAVNSQGALPGMVWQNRDVYLQGPIWAKIPHTDGNFHPSPLMGGFGLKHPPPQILIKNTPVPADPPTAFNQAKLNSFITQYSTGQVSAEIEWELQKENSKRWNPEIQYTSNYYKSTNVDFAVNTEGVYSEPRPIGTRYLTRNL

SEQ ID NO: 1390 - protein, 601 aa, synthetic construct
  REGION 1..601: note = Synthetic
MAPGKKRPVEPSPQRSPDSSTGIGKKGQQPARKRLNFGQTGDSESVPDPQPIGEPPAAPSSVGSGTMAAGGGAPMADNNEGADGVGSSSGNWHCDSTWLGDRVITTSTRTWALPTYNNHLYKQISNGTSGGSTNDNTYFGYSTPWGYFDFNRFHCHFSPRDWQRLINNNWGFRPKRLSFKLFNIQVKEVTQNEGTKTIANNLTSTIQVFTDSEYQLPYVLGSAHQGCLPPFPADVFMIPQYGYLTLNNGSQAVGRSSFYCLEYFPSQMLRTGNNFSFSYTFEDVPFHSSYAHSQSLDRLMNPLIDQYLYYLSRTQSTGGTAGTQQLLFSQAGPSNMSAQARNWLPGPCYRQQRVSTTLSQNNNSNFAWTGATKYHLNGRDSLVNPGVAMATNKDDEDRFFPSSGILMFGKQGAGKDNVDYSNVMLTSEEEIKTTNPVATEQYGVVADNLQQQNTAPIVGAVNSQGALPGMVWQNRDVYLQGPIWAKIPHTDGNFHPSPLMGGFGLKHPPPQILIKSTPVPADPPTAFNQAKLNSFITQYSTGQVSVEIEWELQKENSKCWNPEIQYTSNYYKSTNVDFAVNTEGVYSEPRPIGTRYLTRNL

SEQ ID NO: 1391 - protein, 601 aa, synthetic construct
  REGION 1..601: note = Synthetic
MAPGKKRPVEPSPQRSPDSSTGIGKKGQQPARKRLNFGQTGDSESVPDPQPIGEPPAAPSSVGSGTMAAGGGAPMADNNEGADGVGSSSGNWHCDSTWLGDRVITTSTRTWALPTYNNHLYKQISNGTSGGSTNDNTYFGYSTPWGYFDFNRFHCHFSPRDWQRPINNNWGFRPKRLSFKLFNIQVKEVTQNEGTKTIANNLTSTIQVFTDSEYQLPYVLGSAHQGCLPPFPADVFMIPQYGYLTLNNGSQAVGRSSFYCLEYFPSQMLRTGNNFSFSYPFEDVPFHSSYAHSQSLDRLMNPLIDQYLYYLSRTQSTGGTAGTQQLLFSQAGPSNMSAQARNWLPGPCYRQQRVSTTLSQNNNSNFAWTGATKYHLNGRDSLVNPGVAMATNKDDEDRFFPSSGILMFGKQGAGKDNVDYSNVMLTSEEEIKTTNPVATEQYGVVADNLQQQDTAPIVGAVNSQGALPGMVWQNRDVYLQGPIWAKIPHTDGNFHPSPLMGGFGLKHPPPQVLIKNTPVPADPPTAFNQAKLNSFITQYSTGQVSVEIEWELQKENSKRWNPEIQYTSNYYKSTNVDFAVNTEGVYSEPRPIGTRYLTRNL

SEQ ID NO: 1392 - protein, 601 aa, synthetic construct
  REGION 1..601: note = Synthetic
MAPGKKRPVEPSPQRSPDSSTGIGKKGQQPAGKRLNFGQTGDSESVPDPQPIGEPPAAPSSVGSGTMAAGGGAPMADNNEGADGVGSSSGNWHCDSTWLGDRVITTSTRTWALPTYNNHLYKQISNGTSGGSTNDNTYFGYSTPWGYFDFNRFHCHFSPRDWQRLINNNWGFRPKRLSFKLFNIQVKEVTQNEGTKTIANNLTSTIQVFTDSEYQLPYVLGSAHQGCLPPFPADVFMIPQYGYLTLNNGSQAVGRSSFYCLEYFPSQMLRTGNNFSFSYTFEDVPFHSSYAHSQSLDRLMNPLVDQYLYYLSRTQSTGGTAGTQQLLFSQAGPSNMSAQARNWLPGPCYRQQRVSTTLSQNNNSNFAWTGATKYHLNGRDSLVNPGVAMATNKDDEDRFFPSSGILMFGKQGAGKDNVDYSNVMLTSEEEIKTTNPVATEQYGVVADNLQQQNTAPIVGAVNSQGALPGMVWQNRDVYLQGPIWAKIPHTDGNFHPSPLMGGFGLKHPPPQILIKNTPVPADPPTAFNQAKLNSFITQYSTGQVSVEIEWELQKENSKRWSPEIQYTSNYYKSTNVDFAVNTEGVYSEPRPIGTRYLTRNL

SEQ ID NO: 1393 - protein, 599 aa, synthetic construct
  REGION 1..599: note = Synthetic
MAPGKKRPVEPSPQRSPDSSTGIGKKGQQPARKRLNFGQTGDSESVPDPQPIGEPPAGPSGLGSGTMAAGGGAPMADNNEGADGVGNASGNWHCDSTWLGDRVITTSTRTWALPTYNNHLYKQISSQSAGSTNDNVYFGYSTPWGYFDFNRFHCHFSPRDWQRLINNNWGFRPKKLNFKLFNIQVKEVTTNDGVTTIANNLTSTVQVFSDSEYQLPYVLGSAHQGCLPPFPADVFMIPQYGYLTLNNGSQAVGRSSFYCLEYFPSQMLRTGNNFSFSYTFEDVPFHSSYAHSQSLDRLMNPLIDQYLYYLSRTQSTGGTAGTQQLLFSQAGPSNMSTQARNWLPGPCYRQQRVSTTLSQNNNSNFAWTGATKYHLNGRDSLVNPGVAMATNKDDEDRFFPSSGILMFGKQGAGKDNVDYSNVMLTSEEEIKTTNPVATEQYGVVADNLQQQNTAPIVGAVNSQGALPGMVWQNRDVYLQGPIWAKIPHTDGNFHPSPLMGGFGLKHPPPQILIKNTPVPADPPTAFNQAKLNSFITQYSTGQVSVEIEWELQKENSKRWNPEIQYTSNYYKSTNVDFAVNTEGAYSEPRPIGTRYLTRN

SEQ ID NO: 1394 - protein, 601 aa, synthetic construct
  REGION 1..601: note = Synthetic
MAPGKKRPVEPSPQRSPDSSTGIGKKGQQPARKRLNFGQTGDSESVPDPQPIGEPPAGPSGLGSGTMAAGGGAPMADNNEGADGVGNASGNWHCDSTWLGDRVITTSTRTWALPTYNNHLYKQISSQSAGSTNDNVYFGYSTPWGYFDFNRFHCHFSPRDWQRLINNNWGFRPKKLNFKLFNIQVKEVTTNDGVTTIANNPTSTVQVFSDSEYQLPYVLGSAHQGCLPPFPADVFMIPQYGYLTLNNGSQSVGRSSFYCLEYFPSQMLRTGNNFTFSYTFEDVPFHSSYAHSQSLDRLMNPLIDQYLYYLARTQSNAGGTAGNRELQFYQGGPTTMAEQAKNWLPGPCYRQQRVSTTLSQNNNSNFAWTGATKYHLNGRDSLVNPGVAMATNKDDEDRFFPSSGILMFGKQGAGKDNVDYSNVMLTSEEEIKTTNPVATEQYGVVADNLQQQNTAPIVGAVNSQGALPGMVWQNRDVYLQGPIWAKIPHTDGNFHPSPLMGGFGLKHPPPQILIKNTPVPADPPTAFNQAKLNSFITQYSTGQVSVEIEWELQKENSKRWNPEIQYTSNYYKSTNVDFAVNTEGVYSEPRPIGTRYLTRNL

SEQ ID NO: 1395 - protein, 600 aa, synthetic construct
  REGION 1..600: note = Synthetic
MAPGKKGPVEPSPQRSPDSSTGIGKKGQQPARKRLNFGQTGDSESVPDPQPIGEPPAGPSGLGSGTMAAGGGAPMADNNEGADGVGNASGNWHCDSTWLGDRVITTSTRTWALPTYNNHLYKQISSQSAGSTNDNVYFGYSTPWGYFDFNRFHCHFSPRDWQRLINNNWGFRPKKLNFKLFNIQVKEVTTNDGVTTIANNLTSTVQVFSDSEYQLPYVLGSAHQGCLPPFPADVFMIPQYGYLTLNNGSQSVGRSSFYCLEYFPSQMLRTGNNFTFSYTFEDVPFHSSYAHSQSLDRLMNPLIDQYLYYLARTQSNAGGTAGNRELQFYQGGPTTMAEQAKNWLPGPCFRQQRVSKTLDQNNNSNFAWTGATKYHLNGRNSLVNPGVAMATHKDDEERFFPSSGVLIFGKTGAANKTTLENVLMTNEEEIRPTNPVATEEYGTVSSNLQAANTAAQTQVVNNQGALPGMVWQNRDVYLQGPIWAKIPHTDGNFHPSPLMGGFGLKHPPPQILIKNTPVPANPPEVFTPAKFASFITQYSTGQVSVEIEWELQKENSKRWNPEIQYTSNFDEQTGVDFAVDSQGVYSEPRPIGTRYLTRNL

SEQ ID NO: 1396 - protein, 600 aa, synthetic construct
  REGION 1..600: note = Synthetic
MAPGKKRPVEPSPQRSPDSSTGIGKKGQQPARKRLNFGQTGDSESVPDPQPIGEPPAGPSGLGSGTMAAGGGAPMADNNEGADGVGNASGNWHCDSTWLGDRVITTSTRTWALPTYNNHLYKQISSQSAGSTNDNVYFGYSTPWGYFDFNRFHCHFSPRDWQRLINNNWGFRPKKLNFKLFNIQVKEVTTNDGVTTIANNLTSTVQVFSDSEYQLPYVLGSAHQGCLPPFPADVFMIPQYGYLTLNNGSQSVGRSSFYCLEYFPSQMLRTGNNFTFSYTFEDVPFHSSYAHSQSLDRLMNPLIDQYLYYLARTQSNAGGTAGNRELQFYQGGPTTMAEQAKNWLPRPCFRQQRVSKTLDQNNNSNFAWTGATKYHLNGRNSLVNPGVAMATHKDDEERFFPSSGVLIFGKTGAANKTTLENVLMTNEEEIRPTNPVATEEYGTVSSNLQAANTAAQTQVVNNQGALPGMVWQNRDVYLQGPIWAKIPHTDGNFHPSPLMGGFGLKHPPPQILIKNTPVPANPPEVFTPAKFASFITQYSTGQVSVEIEWELQKENSKRWNPEIQYTSNFDKQTGVDFAVDSQGVYSEPRPIGTRYLTRNL

SEQ ID NO: 1397 - protein, 600 aa, synthetic construct
  REGION 1..600: note = Synthetic
MAPGKKRPVEPSPQRSPDSSTGIGKKGQQPARKRLNFGQTGDSESVPDPQPIGEPPAGPSGLGSGTMAAGGGAPMADNNEGADGVGNASGNWHCDSTWLGDRVITTSTRTWALPTYNNHLYKQISSQSAGSTNDNVYFGYSTPWGYFDFNRFHCHFSPRDWQRLINNNWGFRPKKLNFKLFNIQVKEVTTNDGVTTIANNLTSTVQVFSDSEYQLPYVLGSAHQGCLPPFPADVFMIPQYGYLTLNNGSQSVGRSSFYCLEYFPSQMLRTGNNFTFSYTFEDVPFHSSYAHSQSLDRLMNPLIDQYLYYLARTQSNAGGTAGNRELQFYQGGPTTMAEQAKNWLPGPCFRQQRVSKTLDQNNNSNFAWTGATKYHLNGRNSLVNPGVAMATHKDDEERFFPSSGVLIFGKTGAANKTTLENVLMTNEEEIRPTNPVATEEYGTVSSNLQAANTAAQTQVVNNQGALPGMVWQNRDVYLQGPIWAKIPHTDGNFHPSPLMGGFGLKHPPPQILIKNTPVPANPPEVFTPAKFASFITQYSTGQVSVEIEWELQKENSKRWNPEIQYTSNFDKQTGVDFAVDSQGVYSEPRPIGTRYLTRNL

SEQ ID NO: 1398 - protein, 600 aa, synthetic construct
  REGION 1..600: note = Synthetic
MAPGKKRPVEPSPQRSPDSSTGIGKKGQQPARKRLNFGQTGDSESVPDPQPIGEPPAGPSGLGSGTMAAGGGAPMADNNKGADGVGNASGNWHCDSTWLGDRVITTSTRTWALPTYNNHLYKQISSQSAGSTNDNVYFGYSTPWGYFDFNRFHCHFSPRDWQRLINNNWGFRPKKLNFKLFNIQVKEVTTGDGVTTIANNLTSTVQVFSDSEYQLPYVLGSAHQGCLPPFPADVFMIPQYGYLTLNNDSQSVGRSSFYCLEYFPSQMLRTGNNFTFSYTFEDVPFHSSYAHSQSLDRLMNPLIDQYLYYLARTQSNAGGTAGNRELQFYQGGPTTMAEQAKNWLPGPCFRQQRVSKTLDQNNNSNFAWTGATKYHLNGRNSLVNPGVAMATHKDDEERFFPSSGVLIFGKTGAANKTTLENVLMTNEEEIRPTNPVATEEYGTVSSNLQAANTAAQTQVVNNQGALPGMVWQNRDVYLQGPIWAKIPHTDGNFHPSPLMGGFGLKHPPPQILIKNTPVPANPPEVFTPAKFASFITQYSTGQVSVEIEWELQKENSKRWNPEIQYTSNFDKQTGVDFAVDSQGVYSEPRPIGTRYLTRNL

SEQ ID NO: 1399 - protein, 600 aa, synthetic construct
  REGION 1..600: note = Synthetic
MAPGKKRPVEPSPQRSPDSSTGIGKKGQQPARKRLNFGQTGDSESVPDPQPIGEPPAGPSGLGSGTMAAGGGAPMADNNKGADGVGNASGNWHCDSTWLGDRVITTSTRTWALPTYNNHLYKQISSQSAGSTNDNVYFGYSTPWGYFDFNRFHCHFSPRDWQRLINSNWGFRPKKLNFKLFNIQVKEVTTNDGVTTIANNLTSTVQVFSDSEYQLPYVLGSAHQGCLPPFPADVFMIPQYGYLTLNNGSQSVGRSSFYCLEYFPSQMLRTGNNFTFSYTFEDVPFHSSYAHSQSLDRLMNPLIDQYLYYLARTQSNAGGTAGNRELQFYQGGPTTMAEQAKNWLPGPCFRQQRVSKTLDQNNNSNFAWTGATKYHLNGRNSLVNPGVAMATHKDDEERFFPSSGVLIFGKTGAANKTTLENVLMTNEEEIRPTNPVATEEYGTVSSNLQAANTAAQTQVVNNQGALPGMVWQNRDVYLQGPIWAKIPHTDGNFHPSPLMGGFGLKHPPPQILIKNTPVPANPPEVFTPAKFASFITQYSTGQVSVEIEWELQKENSKRWNPEIQYTSNFDKQTGVDFAVDSQGVYSEPRPIGTRYLTRNL

SEQ ID NO: 1400 - protein, 600 aa, synthetic construct
  REGION 1..600: note = Synthetic
MAPGKKRPVEPSPQRSPDSSTGIGKKGQQPARKRLNFGQTGDSESVPDPQPLGEPPAGPSGLGSGTMAAGGGAPMADNNEGADGVGNASGNWHCDSTWLGDRVITTSTRTWALPTYNNHLYKQISSQSAGSTNDNVYFGYSTPWGYFDFNRFHCHFSPRDWQRLINNNWGFRPKKLNFKLFNIQVKEVTTNDGVTTIANNLTSTVQVFSDSEYQLPYVLGSAHQGCLPPFPADVFMIPQYGYLTLNNGSQSVGRSSFYCLEYFPSQVLRTGNNFTFSYTFEDVPFHSSYAHSQSLDRLMNPLIDQYLYYLARTQSNPGGTSGNRELQFYQGGPSTMAEQAKNWLPGPCFRQQRVSKTLDQNNNSNFAWTGATKYHLNGRNSLVNPGVAMATHKDDEDRFFPSSGVLIFGKTGATNKTTLENVLMTNEEEIRPTNPVATEEYGIVSSNLQAANTAAQTQVVNNQGALPGMVWQNRDVYLQGPIWAKIPHTDGNFHPSPLMGGFGLKHPPPQILIKNTPVPANPPEVFTPAKFASFITQYSTGQVSVEIEWELQKENSKRWNPEIQYTSNFDKQTGVDFAVDSQGVYSEPRPIGTRYLTRNL

SEQ ID NO: 1401 - protein, 600 aa, synthetic construct
  REGION 1..600: note = Synthetic
MAPGKKRPVEPSPQRSPDSSTGIGKKGQQPARKRLNFGQTGDSESVPDPQPIGEPPAAPSSVGSGTMAAGGGAPMADNNEGADGVGSSSGNWHCDSTRLGDRVITTSTRTWALPTYNNHLYKQISSQSAGSTNDNVYFGYSTPWGYFDFNRFHCHFSPRDWQRLINNNWGFRPKKLNFKLFNIQVKEVTTNDGVTTIANNLTSTVQVFSDSEYQLPYVLGSAHQGCLPPFPADVFMIPQYGYLTLNNGSQSVGRSSFYCLEYFPSQMLRTGNNFTFSYTFEDVPFHSSYAHSQSLDRLMNPLIDQYLYYLARTQSNAGGTAGNRELQFYQGGPTTMAEQAKNWLPGPCFRQRRVSKTLDQNNNSNFAWTGATKYHLNGRNSLVNPGVAMATHKDDEERFFPSSGVLIFGKTGAANKTTLENVLMTNEEEIRPTNPVATEEYGTVSSNLQAANTAAQTQVVNNQGALPGMVWQNRDVYLQGPIWAKIPHTDGNFHPSPLMGGFGLKHPPPQILIKNTPVPANPPEVFTPAKFASFITQYSTGQVSVEIEWELQKENSKRWNPEIQYTSNFDKQTGVDFAVDSQGVYSEPRPIGTRYLTRNL

SEQ ID NO: 1402 - protein, 601 aa, synthetic construct
  REGION 1..601: note = Synthetic
MAPGKKRPVEPSPQRSPDSSTGIGKKGQQPARKRLNFGQTGDSESVPDPQPIGEPPAAPSSVGSGTMAAGGGAPMADNNEGADGVGSSSGNWHCDSTWLGDRVITTSTRTWALPTYNNHLYKQISNGTSGGSTNDNTYFGYSTPWGYFDFNRFHCHFSPRDWQRLINNNWGFRPKRLSFKLFNIQVKEVTQNEGTKTIANNLTSTVQVFSDSEYQLPYVLGSAHQGCLPPFPADVFMIPQYGYLTLNNGSQSVGRSSFYCLEYFPSQMLRTGNNFTFSYTFEDVPFHSSYAHSQSLDRLMNPLIDQYLYYLARTQSNAGGTAGNRELQFYQGGPTTMAEQAKNWLPGPCFRQQRVSKTLDQNNNSNFAWTGATKYHLNGRNSLVNPGVAMATHKDDEERFFPSSGVLIFGKTGAANKTTLENVLMTNEEEIRPTNPVATEEYGTVSSNLQAANTAAQTQVVNNQGALPGMVWQNRDVYLQGPIWAKIPHTDGNFHPSPLMGGFGLKHPPPQILIKNTPVPANPPEVFTPAKFASFITQYSTGQVSVEIEWELQKENSKRWNPEIQYTSNFDKQTGVDFAVDSQGVYSEPRPIGTRYLTRNL

SEQ ID NO: 1403 - protein, 600 aa, synthetic construct
  REGION 1..600: note = Synthetic
MAPGKKRPVEPSPQRSPDSSTGIGKKGQQPARKRLNFGQTGDSESVPDPQPIGEPPAGPSGLGSGTMAAGGGAPMADNNEGADGVGNASGNWHCDSTWLGDRVITTSTRTWALPTYNNHLYKQISSQSAGSTNDNVYFGYSTPWGYFDFNRFHCHFSPRDWQRLINNNWGFRPKKLNFKLFNIQVKEVTTNDGVTTIANNLTSTVQVFSDSEYQLPYVLGSAHQGCLPPFPADVFMIPQYGYLTLNNGSQSVGRSSFYCLEYFPSQMLRTGNNFTISYTFEDVPFHSSYAHSQSLDRLMNPLIDQYLYYLARTQSNAGGTAGNQELQFYQGGPTTMAEQAKNWLPGPCFRQQRVSKTLDQNNNSNFAWTGATKYHLNGRNSLVNPGVAMATHKDDEERFFPSSGVLIFGKTGAANKTTLENVLMTNEEEIRPTNPVATEEYGTVSSNLQAANTAAQTQVVNNQGALPGMVWQNRDVYLQGPIWAKIPHTDGNFHPSPLMGGFGLKHPPPQILIKNTPVPADPPTAFNQAKLNSFITQYSTGQVSVEIEWELQKENSKRWNPEIQYTSNYYKSTNVDFAVNTEGVYSEPRPIGTRYLTRNL

SEQ ID NO: 1404 - protein, 598 aa, synthetic construct
  REGION 1..598: note = Synthetic
MAPGKKRPVEPSPQRSPDSSTGIGKKGQQPARKRLNFGQTGDSESVPDPQPIGEPPAAPSSVGSGTMAAGGGAPMADNNEGADGVGSSSGNWHCDSTWLGDRVITTSTRTWALPTHNNHLYKQISNGTSGGSTNDNVYFGYSTPWGYFDFNRFHCHFSPRDRQRLINNNWGFRPKRLSFKLFNIQVKEVTQNEGTKTIANNLTSTIQVFTDSEYQLPYVLGSAHQGCLPPFPADVFMIPQYGYLTLNNGSQAVGRSSFYCLEYFPSQMLRTGNNFSFSYTFEDVPFHSSYAHSQSLDRLMNPLIDQYLYYLSRTQSTEGTAGTQQLLFSQAGPSNMSAQARNWLPGPCYRQQRVSTTLSQNNNSNFAWTGATKYHLNGRDSLVNPGVAMATHKDDEERFFPSSGVLIFGKTGAANKTTLENVLMTNEEEIRPTNPVATEEYGTVSSNLQAANTAAQTQVVNNQGALPGMVWQNRDVYLQGPIWAKIPHTDGNFHPSPLMGGFGLKHPQILIKNTPVPANPPEVFTPAKFASFITQYSTGQVSVEIEWELQKENSKRWNPEIQYTSNFDKQTGVDFAVDSQGVYSEPRPIGTRYLTRNL

SEQ ID NO: 1405 - protein, 599 aa, synthetic construct
  REGION 1..599: note = Synthetic
MAPGKKRPVEQSPQEPDSSAGIGKSGSQPAKKKLNFGQTGDTESVPDPQPIGEPPAAPSGVGSLTMASGGGAPVADNNEGADGVGSSSGNWHCDSQWLGDRVITTSTRTWALPTYNNHLYKQISNSTSGGSSNDNAYFGYSTPWGYFDFNRFHCHFSPRDWQRLINNNWGFRPKRLNFKLFNIQVKEVTDNNGVKTIANNLTSTVQVFTDSDYQLPYVLGSAHEGCLPPFPADVFMIPQYGYLTLNDGGQAVGRSSFYCLEYFPSQMLRTGNNFQFSYEFENVPFHSSYAHSQSLDRLMNPLIDQYLYYLSKTINGSGQNQQTLKFSVAGPSNMAVQGRNYIPGPSYRQQRVSTTVTQNNNSEFAWPGASSWALNGRNSLMNPGPAMASHKEGEDRFFPLSGSLIFGKQGTGRDNVDADKVMITNEEEIKTTNPVATESYGQVATNHQSAQAQAQTGWVQNQGILPGMVWQDRDVYLQGPIWAKIPHTDGNFHPSPLMGGFGMKHPPPQILIKNTPVPADPPTAFNKDKLNSFITQYSTGQVSVEIEWELQKENSKRWNPEIQYTSNYYKSNNVEFAVSTEGVYSEPRPIGTRYLTRNL

SEQ ID NO: 1406 - protein, 599 aa, synthetic construct
  REGION 1..599: note = Synthetic
MAPGKKRPVEQSPQEPDSSAGIGKSGSQPAKKKLNFGQTGDTESVPDPQPIGEPPAAPSGVGSLTMASGGGAPVADNNEGADGVGSSSGNWHCDSQWLGDRVITTSTRTWALPTYNNHLYKQISNSTSGGSSNDNAYFGYSTPWGYFDFNRFHCHFSPRDWQRLINNNWGFRPKRLNFKLFNIQVKEVTDNNGVKTIANNLTSTVQVFTDSDYQLPYVLGSAHEGCLPPFPADVFMIPQYGYLTLNDGSQAVGRSSFYCLEYFPSQMLRTGNNFQFSYEFENVPFHSSYAHSQSLDRLMNPLIDQYLYYLSKTINGSGQNQQTLKFSVAGPSNMAVQGRNYIPGPSYRQQRVSTTVTQNNNSEFAWPGASSWALNGRNSLMNPGPAMASHKEGEDRFFPLSGSLIFGKQGTGRDNVDADKVMITNEEEIKTTNPVATESYGQVATNHQSAQAQAQTGWVQNQGILPGMVWQDRDVYLQGPIWAKIPHTDGNFHPSPLMGGFGMKHPPPQILIKNTPVPADPPTAFNKDKLNSFITQYSTGQVSVEIEWELQKENSKRWNPEIQYTSNYYKSNNVEFAVNTEGVYSEPRPIGTRYLTRNL

SEQ ID NO: 1407 - protein, 598 aa, synthetic construct
  REGION 1..598: note = Synthetic
MAPGKKRPVEHSPVEPDSSSGTGKAGQQPARKRLNFGQTGDADSVPDPQPLGQPPAAPSGLGTNTMATGSGAPMADNNEGADGVGNSSGNWHCDSTWMGDRVITTSTRTWALPTYNNHLYKQISSQSGASNDNHYFGYSTPWGYFDFNRFHCHFSPRDWQRLINNNWGFRPKRLNFKLFNIQVKEVTQNDGTTTIANNLTGTVQVFTDSEYQLPYVLGSAHQGCLPPFPADVFMVPQYGYLTLNNGSQAVGRSSFYCLEYFPSQMLRTGNNFTFSYTFEDVPFHSSYAHSQSLGRLMNPLIDQYLYYLSRTNTPSGTTTQSRLQFSQAGASDIRDQSRNWLPGPCYRQQRVSKTSADNNNSEYSWTGATKYHLNGRDSLVNPGPAMASHKDDEEKFFPQSGVLIFGKQGSEKTNVDIEKVMITDEEEIRTTNPVATEQYGSVSTNLQRGNRQAATADVNTQGVLPGMVWQDRDVYLQGPIWAKIPHTDGHFHPSPLMGGFGLKHPPPQILIKNTPVPANPSTTFSAAKFASFITQYSTGQVSVEIEWELQKENSKRWNPEIQYTSNYNKSVNVDFTVDTNGVYSEPRPIGTRYLTRNL

SEQ ID NO: 1408 - protein, 598 aa, synthetic construct
  REGION 1..598: note = Synthetic
MAPGKKRPVEHSPVEPDSSSGTGKAGQQPARKRLNFGQTGDADSVPDPQPLGQPPAAPSGLGTNTMATGSGAPMADNNEGADGVGNSSGNWHCDSTWMGDRVITTSTRTWALPTYNNHLYKQISSQSGASNDNHYFGYSTPWGYFDFNRFHCHFSPRDWQRLINNNWGFRPKRLNFKLFNIQVKEVTQNDGTTTIANNLTSTVQVFTDSEYQLPYVLGSAHQGCLPPFPADVFMVPQYGYLTLNNESQAVGRSSFYCLEYFPSQMLRTGNNFTFSYTFEDVPFHSSYAHSQSLGRLMNPLIDQYLYYLSRTNTPSGTTTQSRLQFSQAGASDIRDQSRNWLPGPCYRQQRVSKTSADNNNSEYSWTGATKYHLNGRDSLVNPGPAMASHKDDEEKFFPQSGVLIFGKQGSEKTNVDIEKVMITDEEEIRTTNPVATEQYGSVSTNLQRGNRQAATADVNTQGVLPGMVWQDRDVYLQGPIWAKIPHTDGHFHPSPLMGGFGLKHPPPQILIKNTPVPANPSTTFSAAKFASFITQYSTGQVSVEIEWELQKENSKRWNPEIQYTSNYNKSVNVDFTVDTNGVYSEPRPIGTRYLTRNL

SEQ ID NO: 1409 - protein, 598 aa, synthetic construct
  REGION 1..598: note = Synthetic
MAPGKKRPVEHSPVEPDSSSGTGKAGQQPARKRLNFGQTGDADSVPDPQPLGQPPAAPSGLGTNTMATGSGAPMADNNEGADGVGNSSGNWHCDSTWMGDRVITTSTRTWALPTYNNHLYKQISSQSGASNDNHYFGYSTPWGYFDFNRFHCHFSPRDWQRLINNNWGFRPKRLNFKLFNIQVKEVTQNDGTTTIANNLTSTVQVFTDSEYQLPYVLGSAHQGCLPPFPADVFMVPQYGYLTLNNGSQAAGRSSFYCLEYFPSQMLRTGNNFTFSYTFEDVPFHSSYAHSQSLGRLMNPLIDQYLYYLSRTNTPSGTTTQSRLQFSQAGASDIRDQSRNWLPGPCYRQQRVSKTSADNNNSEYSWTGATKYHLNGRDSLVNPGPAMASHKDDEEKFFPQSGVLIFGKQGSEKTNVDIEKVMITDEEEIRTTNPVATEQYGSVSTNLQRGNRQAATADVNTQGVLPGMVWQDRDVYLQGPIWAKIPHTDGHFHPSPLMGGFGLKHPPPQILIKNTPVPANPSTTFSAAKFASFITQYSTGQVSVEIEWELQKENSKRWNPEIQYTSNYNKSVNVDFTVDTNGVYSEPRPIGTRYLTRNL

SEQ ID NO: 1410 - protein, 598 aa, synthetic construct
  REGION 1..598: note = Synthetic
MAPGKKRPVEHSPVEPDSSSGTGKAGQQPARKRLNFGQTGDADSVPDPQPLGQPPAAPSGLGTNTMATGSGAPMADNNEGADGVGNSSGNWHCDSTWMGDRVITTSTRTWALPTYNNHLYKQISSQSGASNDNHYFGYSTPWGYFDFNRFHCHFSPRDWQRLINNNWGFRPKRLNFKLFNIQVKEVTQNDGTTTIANNLTSTVQVFTDSGYQLPYVLGSAHQGCLPPFPADVFMVPQYGYPTLNNGSQAVGRSSFYCLEYFPSQMLRTGNNFTFSYTFEDVPFHSSYAHSQSLDRLMNPLIDQYLYYLSTTNTPSGTTTQSRLQFSQAGASDIRDQSRNWLPGPCYRQQRVSKTSADNNNSEYSWTGATKYHLNGRDSLVNPGPAVASHKDDEEKFFPQSGVLIFGKQGSEKTNVDIEKVMITDEEEIRTTNPVATEQYGSVSTNLQRGNRQAATADVNTQGVLPGMVWQDRDVYLQGPIWAKIPHTDGHFHPSPLMGGFGLKHPPPQILIKNTPVPANPSTTFSAAKFASFITQYSTGQVSVEIEWELQKENSKRWNPEIQYTSNYNKSVNVDFTVDTNGVYSEPRPIGTRYLTRNL

SEQ ID NO: 1411 - protein, 598 aa, synthetic construct
  REGION 1..598: note = Synthetic
MAPGKKRPVEHSPVEPDSSSGTGKAGQQPARKRLNFGQTGDADSVPDPQPLGQPPAAPSGLGTNTMATGSGAPMADNNEGADGVGNSSGNWHCDSTWMGDRVITTSTRTWALPTYNNHLYKQISSQSGASNDSHYFGYSTPWGYFDFNRFHCHFSPRDWQRLINNNWGFRPKRLNFKLFNIQVKEVTQNDGTTTIANNLTSTVQVFTDSEYQLPYVLGSAHQGCLPPFPADVFMVPQYGYLTLNNGSQAVGRSSFYCLEYFPSQMLRTGNNFTFSYTFEDVPFHSSYAHSQSLDRLMNPLIDQYLYYLSTTNTPSGTTTQSRLQFSQAGASDIRDQSRNWLPGPCYRQQRVSKTSADNNNSEYSWTGATKYHLNGRDSLVNPGPAMASHKDNEEKFFPQSGVLIFGKQGSEKTNVDIEKVMITDEEEIRTTNPVATEQYGSVSTNLQRGNRQAATADVNTQGVLPGMVWQDRDVYLQGPIWAKIPHTDGHFHPSPLMGGFGLKHPPPQILIKNTPVPANPSTTFSAAKFASFITQYSTGQVSVEIEWELQKENSKRWNPEIQYTSNYNKSVNVDFTVDTNGVYSEPRPIGTRYLTRNL

SEQ ID NO: 1412 - protein, 598 aa, synthetic construct
  REGION 1..598: note = Synthetic
MAPGKKRPVEHSPAEPDSSSGTGKAGQQPARKRLNFGQTGDADSVPDPQPLGQPPAAPSGLGTNTMASGSGAPMADNNEGADGVGNSSGNWHCDSTWMGDRVITTSTRTWALPTYNNHLYKQISSQSGASNDNHYFGYSTPWGYFDFNRFHCHFSPRDWQRLINNNWGFRPKRLNFKLFNIQVKEVTQNDGTTTIANNLTSTVQVFTDSEYQLPYVLGSAHQGCLPPFPADVFMVPQYGYLTLNNGSQAVGRSSFYCLEYFPSQMLRTGNNFTFSYTFEDVPFHSSYAHSQSLDRLMNPLIDQYLYYLSRTNTPSGTTTQSRLQFSQAGASDIRDQSRNWLPGPCYRQQRVSKTSADNNNSEYSWTGATKYHLNGRDSLVNPGPAMASHKDDEEKFFPQSGVLIFGKQGSEKTNVDIEKVMITDEEEIRTTNPVATEQYGSVSTNLQGGNTQAATADVNTQGVLPGMVWQDRDVYLQGPIWAKIPHTDGHFHPSPLMGGFGLKHPPPQILIKNTPVPANPSTTFSAAKFASFITQYSTGQVSVEIEWELQKENSKRWNPEIQYTSNYNKSVNVDFTVDTNGVYSEPRPIGTRYLTRNL

SEQ ID NO: 1413 - protein, 598 aa, synthetic construct
  REGION 1..598: note = Synthetic
MAPGKKRPVEHSPAEPDSSSGTGKSGNQPARKRLNFGQTGDSDSVPDPQPLGQPPAAPSGLGTNTMATGSGAPMADNNEGADGVGNSSGNWHCDSTWMGDRVITTSTRTWALPTYNNHLYKQISSQSGASNDNHYFGYSTPWGYFDFNRFHCHFSPRDWQRLINNNWGFRPKRLNFKLFNIQVKEVTQNDGTTTIANNLTSTVQVFTDSEYQLPYVLGSAHQGCLPPFPADVFMVPQYGYLTLNNGSQAVGRSSFYCLEYFPSQMLRTGNNFTFSYTFEDVPFHSSYAHSQSLDRLMNPLIDQYLYYLSRTNTPSGTTTQSRLQFSQAGASDIQDQSRNWLPGPCYRQQRVSKTSADNNNSEYSWTGATKYHLNGRDSLVNPGPAMASHKDDEEKFFPQSGVLIFGKQGSEKTNVDIEKVMITDEEEIRTTNPVATEQYGSVSTNLQSGNTQAATADVNTQGVLPGMVGQDRDVYLQGPTWAKIPHTDGHFHPSPLMGGFGLKHPPPQILIKNTPVPANPSTTFSAAKFASFITQYSTGQVSVEIEWELQKENSKRWNPEIQYTSNYNKSVNVDFTVDTNGVYSEPRPIGTRYLTRNL

SEQ ID NO: 1414 - protein, 598 aa, synthetic construct
  REGION 1..598: note = Synthetic
MAPGKKRPVEHSPAEPDSSSGTGKSGNQPARKRLNFGQTGDSDSVPDPQPLGQPPAAPSGLGTNTMATGSGAPMADNNEGADGVGNSSGNWHCDSTWMGDRVITTSTRTWALPTYNNHLYKQISSQSGASNDNHYFGYSTPWGYFDFNRFHCHFSPRDWQRLINNNWGFRPKRLNFKLFNIQVKEVTQNDGTTTIANNLTSTVQVFTDSEYQLPYVLGSAHQGCLPPFPADVFMVPQYGYLTLNNGSQAVGRSSFYCLEYFPSQMLRTGNSFTFSYTFEDVPFHSSYAHSQSLDRLMNPLIDQYLYYLSRTNTPSGTTTQSRLQFSQAGASDIRDQSRNWLPGPCYRQQRVSKTSADNNNSEYSWTGATKYHLNGRDSLVNPGPAMASHKDDEEKFFPQSGVLIFGKQGSEKTNVDIEKVMITDEEEIRTTNPVATEQYGSVSTNLQSGNTQAATADVNTQGVLPGMVWQDRDVYLQGPIWAKIPHTDGHFHPSPLMGGFGLKHPPPQILIKNTPVPANPSTTFSAAKFASFITQYSTGQVSVEIEWELQKENSKRWNPEIQYTSNYNKSVNVDFTVDTNGVYSEPRPIGTRYLTRNL

SEQ ID NO: 1415 - protein, 598 aa, synthetic construct
  REGION 1..598: note = Synthetic
MAPGKKRPVEHSPAEPDSSSGTGKSGNQPARKRLNFGQTGDSDSVPDPQPLGQPPAAPSGLGTNTMATGSGAPMADNNEGADGVGNSSGNWHCDSTWMGDRVITTSTRTWALPTYNNHLYKQISSQSGASNDNHYFGYSTPWGYFDFNRFHCHFSPRDWQRLINNNWGFRPKRLNFKLFNIQVKEVTQNDGTTTIANNLTSTVQVFTDSEYQLPYVLGSAHQGCLPPFPADVFMVPQYGYLTLNNGSQAVGRSSFYCLGYFPSQMLRTGNNFTFSYTFEDVPFHSSYAHSQSLDRLMNPLIDQYLYYLSRTNTPSGTTTQSRLQFSQAGASDIRDQSRNWLPGPCYRQQRVSKTSADNNNSEYSWTGATKYHLNGRDSLVNPGPAMASHKDDEEKFFPQSGVLIFGKQGPEKTNVDIEKVMITDEEEIRTTNPVATEQYGSVSTNLQSGNTQAATADVNTQGVLPGMVWQDRDVYLQGPIWAKIPHTDGHFHPSPLMGGFGLKHPPPQILIKNTPVPANPSTTFSAAKFASFITQYSTGQVSVEIEWELQKENSKRWNPEIQYTSNYNKSVNVDFTVDTNGVYSEPRPIGTRYLTRNL

SEQ ID NO: 1416 - protein, 598 aa, synthetic construct
  REGION 1..598: note = Synthetic
MAPGEKRPVEHSPAEPDSSSGTGKAGQQPARKRLNFGQTGDADSVPDPQPLGQPPAAPSGLGTNTMASGSGAPMADNNEGADGVGNSSGNWYCDSTWMGDRVITTSTRTWALPTYNNHLYKQISSQSGASNDNHYFGYSTPWGYFDFNRFHCHFSPRDWQRLINNNWGFRPKRLSFKLFNIQVKEVTQNDGTTTIANNLTSTVQVFTDSEYQLPYVLGSAHQGCLPPFPADVFMVPQYGYLTLNNGSQAVGRSSFYCLEYFPSQMLRTGNNFTFSYTFEDVPFHSSYAHSQSLDRLMNPLIDQYLYYLSRTNTPSGTTTMSRLQFSQAGASDIRDQSRNWLPGPCYRQQRVSKTAADNNNSDYSWTGATKYHLNGRDSLVNPGPAMASHKDDEEKYFPQSGVLIFGKQDSGKTNVDIEKVMITDEEEIRTTNPVATEQYGSVSTNLQSGNTQAATSDVNTQGVLPGMVWQDRDVYLQGPIWAKIPHTDGHFHPSPLVGGFGLKHPPPQILIKNTPVPANPSTTFSAAKFASFITQYSTGQVSVEIEWELQKENSKRWNPEIQYTSNYNKSVNVDFTVDTNGVYSEPRPIGTRYLTRNL

SEQ ID NO: 1417 - protein, 598 aa, synthetic construct
  REGION 1..598: note = Synthetic
MAPGEKRPVEHSPAEPDSSSGTGKAGQQPARKRLNFGQTGDADSVPDPQPLGQPPAAPSGLGTNTMASGSGAPMADNNEGADGVGNSSGNWHCDSTWMGDRVITTSTRTWALPTYNNHLYKQISSQSGASNDNHYFGYSTPWGHFDFNRFHCHFSPRDWQRLINNNWGFRPKRLSFKLFNIQVKEVTQNDGTTTIANNLTSTVQVFTDSEYQLPYVLGSAHQGCLPPFPADVFMVPQYGYLTLNNGSQAVGRSSFYCLEYFPSQMLRTGNNFTFSYTFEDVPFHSSYAHSQSLDRLMNPLIDQYLYYLSRTNTPSGTTTMSRLQFSQAGASDIRDQSRNWLPGPCYRQQRVSKTAADNNNSDYSWTGATKYHLNGRDSLVNPGPAMASHKDDEEKYFPQSGVLIFGKQDSGKTNVDIEKVMITDEEEIRTTNPVATEQYGSVSTNLQSGNTQAATSDVNTQGVLPGMVWQDRDVYLQGPIWAKIPHTDGHFHPSPPMGGFGLKHPPPQILIKNTPVPANPSTTFSAAKFASFITQYSTGQVSVEIEWELQKENSKRWNPEIQYTSNYNKSVNVDFTVDTNGVYSEPRPIGARYLTRNL

SEQ ID NO: 1418 - protein, 598 aa, synthetic construct
  REGION 1..598: note = Synthetic
MAPGKKRPVEHSPAEPDSSSGTGKAGQQPARKRLNFGQTGDADSVPDPRPLGQPPAAPSGLGTNTMASGSGAPMADNNEGADGVGNSSGNWHCDSTWMGDRVITTSTRTWALPTYNNHLYKQISSQSGASNDNHYFGYSTPWGYFDFNRFHCHFSPRDWQRLINNNWGFRPKRLSFKLFNIQVKEVTQNDGTTTIANNLTSTVQVFTDSEYQLPYVLGSAHQGCLPPFPADVFMVPQYGYLTLNNGSQAVGRSSFYCLEYFPSQMLRTGNNFTFSYTFEDVPFHSSYAHSQSLDRLMNPLIDQYLYYLSRTNTPSGTTTMSRLQFSQAGASDIRDQSRNWLPGPCYRQQRVSKTAADNNNSDYSWTGATKYHLNGRDSLVNPGPAMASHKDDEEKYFPQSGVLIFGKQDSGKTNVDIEKVMITDEEEIRTTNPVATEQYGSVSTNLQSGNTQAATSDVNTQGVLPGMVWQDRDVYLQGPIWAKIPHTDGHFHPSPLMGGFGLKHPPPQILIKNTPVPANPSTTFSAAKFASFITQYSTGQVSVEIEWELQKENSKRWNPEIQYTSNYNKSVNVDFTVDTNGVYSEPRPIGTRYLTRNL

SEQ ID NO: 1419 - protein, 598 aa, synthetic construct; identical to SEQ ID NO: 1418
  REGION 1..598: note = Synthetic

SEQ ID NO: 1420 - protein, 598 aa, synthetic construct
  REGION 1..598: note = Synthetic
MAPGKKRPVEHSPAEPDSSSGTGKAGQQPARKRLNFGQTGDADSVPDPQPLGQPPAAPSGLGTNTMASGSGAPMADNNEGADGVGNSSGNWHCDSTWMGDRVITTSTRTWALPTCNNHLYKQISSQSGASNDNHYFGYSTPWGYFDFNRFHCHFSPRDWQRLINNNWGFRPKRLSFKLFNIQVKEVTQNDGTTTIANNLTSTVQVFTDSEYQLPYVLGSAHQGCLPPFPADVFMVPQYGYLTLNNGSQAVGRSSFYCLEYFPSQMLRTGNNFTFSYTFEDVPFHSSYAHSQSLDRLMNPLIDQYLYYLSRTNTPSGTTTMSRLQFSQAGASDIRDQSRNWLPGPCYRQQRVSKTAADNNNSDYSWTGATKYHLNGRDSLVNPGPAMASHKDDEEKYFPQSGVLIFGKQDSGKTNVDIEKVMITDEEEIRTTNPVATEQYGSVSTYLQSGNTQAATSDVNTQGVLPGMVWQDRDVYLRGPIWAKIPHTDGHFHPSPLMGGFGLKHPPPQILIKNTPVPANPSTTFSAAKFASFITQYSTGQVSVEIEWELQKENSKRWNPEIQYTSNYNKSVNVDFTVDTNGVYSEPRPIGTRYLTRNL

SEQ ID NO: 1421 - protein, 598 aa, synthetic construct
  REGION 1..598: note = Synthetic
MAPGKKRPVEHSPAEPDSSSGTGKAGQQPARKRLNFGQTGDADSVPDPQPLGQPPAAPSGLGTNTMASGSGAPMADNNEGADGVGNSSGNWHCDSTWMGGRVITTSTRTWALPTYNNHLYKQISSQSGASNDNHYFGYSTPWGYFDFNRFHCHFSPRDWQRLINNNWGFRPKRLSFKLFNIQVKEVTQNDGTTTIANNLTSTVQVFTDSEYQLPYVLGSAHQGCLPPFPADVFMVPQYGYLTLNNGSQAVGRSSFYCLEYFPSQTLRTGNNFTFSYTFEDVPFHSSYAHSQSLDRLMNPLIDQYLYYLSRTNTPSGTTTMSRLQFSQAGASDIRDQSRNWLPGPCYRQQRVSKTAADNNNSDYSWTGATKYHLNGRDSLVNPGPAMASHKDDEEKYFPQSGVLIFGKQDSGKTNVDIEKVMITDEEEIRTTNPVATEQYGSVSTNLQSGNTQAATSDVNTQGVLPGMVWQDRDVYLQGPIWAKIPHTDGHFHPSPLMGGFGLKHPPPQILIKNTPVPANPSTTFSAAKFASFITQYSTGQVSVEIEWELQKENSKRWNPEIQYTSNYNKSVNVDFTVDTNGVYSEPRPIGTRYLTRNL

SEQ ID NO: 1422 - protein, 598 aa, synthetic construct
  REGION 1..598: note = Synthetic
MAPGKKRPVEHSPAEPDSSSGTGKAGQQPARKRLNFGQTGDADSVPDPQPLGQPPAAPSGLGTNTMASGSGAPMADNNEGADGVGNSSGNWHCDSTWMGDRVITTSTRTWALPTYNNHLYKQISSQSGASNDNHYFGYSTPWGYFDFNRFHCHFSPRDWQRLINNNWGFRPKRLSFKLFNIQVKEVTQNDGTTTIANNLTSTVQVFTDSEYQLPYVLGSAHQGCLPPFPADVFMVPQYGYLTLNNGSQAVGRSSFYCLEYFPSQMLRTGNNFTFSYTFEDVPFHSSYAHSQSLDRLMNPLIDQYLYYLSRTNTPSGTTTMSRLQFSQAGASDIRDQSRNWLPGPCYRQQRVSKTAADNNNSDYSWTGATKYHLNGRDSLVNPGPAMASHKDDEEKYFPQSGVLIFGKQDSGKTNVDIEKVMITDEEEIRTTNPVATEQYGSVSTNLQSGNTQAATSDVNTQGVLPGMVWQDRDVYLQGPIWAKIPHTDGHFHPSPLMGGFGLKHPPPQILIKNTPVPANPSTTFSAAKFASFITQYSTGQVSVEIEWELQKENSKRWNPEIQYTSNYNKSVNVDFTVDTNGVYSEPRPIGTRYLTRNL

SEQ ID NO: 1423 - protein, 598 aa, synthetic construct
  REGION 1..598: note = Synthetic
MAPGKKRPVEHSPAEPDSSSGTGKAGQQPARKRLNFGQTGDADSVPDPQPLGQPPAAPSGLGTNTMASGSGAPMADNNEGADGVGNSSGNWHCDSTWMGDRVITTSTRTWALPTYNNHLYKQISSQSGASNDNHYFGYSTPWGYFDFNRFHCHFSPRDWQRLINNNWGFRPKRLSFKLFNIQVKEVTQNDGTTTIANNLTSTVQVFTDSGYQLPYVLGSAHQGCLPPFPADVFMVPQYGYLTLNNGSQAVGRSSFYCLEYFPSQMLRTGNNFTFSYTFEDVPFHSSYAHGQSLDRLMNPLIDQYLYYLSRTNTPSGTTTMSRLQFSQAGASDVRDQSRNWLPGPCYRQQRVSKTAADNNNSDYSWTGATKYHLNGRDSLVNPGPAMASHKDDEEKYFPQSGVLVFGKQDSGKTNVDIEKVMITDEEEIRTTNPAATEQYGSVSTNLQSGNTQAATSDVNTQGVLPGMVWQDRDVYLQGPIWAKIPHTDGHFHPSPLMGGFGLKHPPPQILIKNTPVPANPSTTFSAAKFVSFITQYSTGQVSVEIEWELQKENSKRWNPEIQYTSNYNKSVNVDFTVDTNGVYSEPRPIGTRYLTRNL

SEQ ID NO: 1424 - protein, 598 aa, synthetic construct
  REGION 1..598: note = Synthetic
MAPGKKRPVEHSPVEPDSSSGTGKAGQQPARKRLNFGQTGDADSVPDPQPLGQPPAAPSGLGSTTMATGSGAPMADNNEGADGVGNSSGNWHCDSQWLGDRVITTSTRTWALPTYNNHLYKQISSQSGASNDNHYFGYSTPWGYFDFNRFHCHFSPRDWQRLVNNNRGFRPKRLNFKLFNIQVKEVTQNDGTTTIANNLTSTVQVFTDSEYQLPYVLGSAHQGCLPPFPADVFMVPQYGYLTLNNGSQAVGRSSFYCLEYFPSQMLRTGNNFQFSYTFEDVPFHSSYAHSQSLDRLMNPLIDQYLYYLNKTQTNSGTLQQSRLLFSQAGPTNMSLQAKNWLPGPCYRQQRLSKQANDNNNSNFPWTAATKYHLNGRDSLVNPGPAMASHKDDEEKFFPMHGTLIFGKQGTNANDADLENVMITDEEEIRATNPVATEQYGTVSNNLQNSNTGPTTGTVNHQGALPGMVWQDRDVYLQGPIWAKIPHTDGHFHPSPLMGGFGLKHPPPQIMIKNTPVPANPPTNFSSAKFASFITQYSTGQVSVEIEWELQKENSKRWNPEIQYTSNYNKSVNVDFTVDTNGVYSEPRPIGTRYLTRNL

SEQ ID NO: 1425 - protein, 598 aa, synthetic construct
  REGION 1..598: note = Synthetic
MAPGKKRPVEHSPVEPDSSSGTGKAGQQPARKRLNFGQTGDADSVPDPQPLGQPPAAPSGLGSTTMATGSGAPMADNNEGADGVGNSSGNWHCDSQWLGDRVITTSTRTWALPTYNNHLYKQISSQSGASNDNHYFGYSTPWGYFDFNRFHCHFSPRDWQRLINNNWGFRPKRLNFKLFNIQVKEVTQNDGTTTIANNLTSTVQVFTDSEYQLPYVLGSAHQGCLPPFPADVFMVPQYGYLTLNNGSQAVGRSSFYCLEYFPSQMLRTGNNFQFSYTFEDVPFHSSYAHSQSLDRLMNPLIDQYLYYLNKTQTNSGTLQQSRLLFSQAGPTNMSLQAKNWLPGPCYRQQRLSKQANDNNNSNFPWTAATKYHLNGRDSLVNPGPAMASRKDDEEKFFPMHGTLIFGKQGTNANDADLENVMITDEEEIRATNPVATEQYGTVSNNLQNSNTGPTTGTVNHQGALPGMVWQDRDVYLQGPIWAKIPHTDGHFHPSPLMGGFGLKHPPPQIMIKNTPVPANPPTNFSSAKFASFITQYSTGQVSVEIEWELQKENSKRWNPEIQYTSNYNKSVNVDFTVDTNGVYSEPRPIGTRYLTRNL

SEQ ID NO: 1426 - protein, 598 aa, synthetic construct
  REGION 1..598: note = Synthetic
MAPGKKRPVEHSPVEPDSSSGTGKAGQRPARKRLNFGQTGDADSVPDPQPLGQPPAAPSGLGSTTMATGSGAPMADNNEGADGVGNSSGNWHCDSQWLGDRVITTSTRTWALPTYNNHLYKQISSQSGASNDNHYFGYSTPWGYFDFNRFHCHFSPRDWQRLINNNWGFRPKRLNFKLFNIQVKEVTQNDGTTTIANNLTSTVQVFTDSEYQLPYVLGSAHQGCLPPFPADVFMVPQYGYLTLNNGSQAVGRSSFYCLEYFPSQMLRTGNNFQFSYTFEDVPFHSSYAHSQSLDRLMNPLIDQYLYYLNKTQTNSGTLQQSRLLFSQAGPTNMSLQAKNWLPGPCYRQQRLSKQANDNNNSNFPWTAATKYHLNGRDSLVNPGPAMASHKDDEEKFFPMHGTLIFGKQGTNANDADLENVMITDEEEIRATNPVATEQYGTVSNNLQNSNTGPTTGTVNRQGALPGMVWQDRDVYLQGPIWAKIPHTDGHFHPSPLMGGFGLKHPPPQIMIKNTPVPANPPTNFSSAKFASFITQYSTGQVSVEIEWELQKENSKRWNPEIQYTSNYNKSVNVDFTVDTNGVYSEPRPIGTRYLTRNL

SEQ ID NO: 1427 - protein, 598 aa, synthetic construct
  REGION 1..598: note = Synthetic
MAPGKKRPVEHSPVEPDSSSGTGKAGQQPARKRLNFGQTGDADSVPDPQPLGQPPAAPSGLGSTTMATGSGAPMADNNEGADGVGNSSGNWHCDSQWLGDRVITTSTRTWALPTYNNHLYKQISSQSGASNDNHYFGYSTPWGYFDFNRFHCHFSPRDWQRLINNNWGFRPKRLNFKLFNIQVKEVTQNGGTTTIANNLTSTVQVFTDSEYQLPYVLGSAHQGCLPPFPADVFMVPQYGYLTLNNGSQAVGRSSFYCLEYFPSQMLRTGNNFQFSYTFEDVPFHSSYAHSQSLDRLMNPLIDQYLYYLNKTQTNSGTLQQSRLLFSQAGPTNMSLQAKNWLPGPCYRQQRLSKQANGNNNSNFPWTAATKYHLNGRDSLVNPGPAMASHKDDEEKFFPMHGTLIFGKQGTNANDADLENVMITDEEEIRATNPVATEQYGTVSNNLQNSNTGPTTGTVNHQGALPGMVWQDRDVYLQGPIWAKIPHTDGHFHPSPLTGGFGLKHPPPQIMIKNTPVPANPPTNFSSAKFASFITQYSTGQVSVEIEWELQKENSKRWNPEIQYTSNYNKSVNVDFTVDTNGVYSEPRPIGTRYLTRNL

SEQ ID NO: 1428 - protein, 598 aa, synthetic construct
  REGION 1..598: note = Synthetic
MAPGKKRPVEHSPVEPDSSSGTGKAGQQPARKRLNFGQTGDADSVPDPQPLGQPPAAPSGLGSTTMATGSGAPMADNNEGADGVGNSSGNWHCDSQWLDDRVIATSTRTWALPTYNNHLYKQISSQSGACNDNHYFGYSTPWGYFDFNRFHCHFSPRDWQRLINSNWGFRPKRLNFKLFNIQVKEVTQNDGTTTIANNLTSTVQVFTDSEYQLPYVPGSAHQGCLPPFPADVFMVPQYGYLTLNNGSQAVGRSSFYCLEYFPSQMLRTGNNFQFSYTFEDVPFHSSYAHCQSLDRLMNPLIDQYLYYLNKTQTNSGTLQQSRLLFSQAGPTNMSLQAKNWLPGPCYRQQRLSKQANDNNNCNFPWTAATKYHLNGRDSLVNPGPAMASHKDDEEKFFPMHGTLIFGKQGTNANDADLENVMITDEEEIRPTNPVATEQYGTVSNNLQNSNTGPTTGTVNHQGALPGMVWQDRDVYLQGPIWAKIPHTDGHFHPSPLMGGFGLKHPPPQIMIKSTPVPANPPTNFSSAKFASSITQYSTGQVSVEIEWELQKENSKRWNPEIQYTSNYNKSVNVDFTVDTNGVYSEPRPIGTRYLTRNL

SEQ ID NO: 1429 - protein, 598 aa, synthetic construct
  REGION 1..598: note = Synthetic
MAPGKKRPVEHSPAEPDSSSGTGKAGQQPARKRLNFGQTGDADSVPDPQPLGQPPAAPSGLGSTTMATGSGAPMADNNEGADGVGNSSGNWHCDSQWLGDRVITTSTRTWALPTYNNHLYKQISSQSGASNDNHYFGYSTPWGYFDFNRFHCHFSPRDWQRLINNNWGFRPKRLNFKLFNIQVKEVTQNDGTTTIANNLTSTVQVFTDSEYQLPYVLGSAHQGCLPPFPADVFMVPQYGYLTLNNGSQAVGRSPFYCLEYFPSQMLRTGNNFQFSYTFEDVPFHSSYAHSQSLDRLMNPLIDQYLYYLNKTQTNSGTLQQSRLLFSQAGPTNMSLQAKNWLPGPCYRQQRLSKQANDNNNSNFPWTAATKYHLNGRDSLVNPGPAMASHKDDEEKFFPMHGTLIFGKQGTNANDADLENVMITDEEEIRTTNPVATEQYGTVSNNLQNSNTGPTTGTVNHQGALPGMVWQDRDVYLQGPIWAKIPHTDGHFHPSPLMGGFGLKHPPPQIMIKNTPVPANPPTNFSSAKFASFITQYSTGQVSVEIEWELQKENSKRWNPEIQYTSNYNKSVNVDFTVDNNGVYSEPRPIGTRYLTRNL

SEQ ID NO: 1430 - protein, 598 aa, synthetic construct
  REGION 1..598: note = Synthetic
MAPGKKRPVEHSPVEPDSSSGTGKAGNQPARKRLNFGQTGDADSVPDPQPLGQPPAAPSGLGSTTMATGSGAPVADNNEGADGVGNSSGNWHCDSQWLGDRVITTSTRTWALPTYNNHLYKQISSQSGASNDNHYFGYSTPWGYFDFNRFHCHFSPRDRQRLINNNWGFRPKRLNFKLFNIQVKEVTQNDGTTTIANNLTSTVQVFTDSGYQLPYVLGLAHQGCLPPFPADVFMVPQYGYLTLNNGSQAVGRSSFYCLEYFPSQMLRTGNNFQFSYTFEDVPFHSSYAHSQSLDRLMNPLIDQYLYYLNKTQSNSGTLQQSRLLFSQAGPTSMSLQAKNWLPGPCYRQQRLSKQANDNNNSNFPWTAATKYHLNGRDSLVNPGPAMASHKDDEEKFFPMHGTLIFGKQGTNANDADLDNVMITDEEEIRTTNPVATEQYGYVSNNLQNSNTGPTTGTVNHQGALPGMVWQDRDVYLQGPIWAKIPHTDGHFHPSPLMGGFGLKHPPPQIMIKNTPVPANPPTNFSSAKFASFITQYSTGQVSVEIEWELQKEDSKRWNPEIQYTSNYNKPVNVDFTVDTNGVYSEPRPIGTRYLTRNL

SEQ ID NO: 1431 - protein, 598 aa, synthetic construct
  REGION 1..598: note = Synthetic
MAPGKKRPVEHSPVEPDSSSGTGKAGNQPARKRLNFGQTGDADSVPDPQPLGQPPAAPSGLGSTTMATGSGAPVADNNEGADGVGNSSGNWHCDSQWLGDRVITTSTRTWALPTYNNHLYKQISSQSGASNDNHYFGYSTPWGYFDFNRFHCHFSPRDWQRLINNNWGFRPKRLNFKLFNIQVKEVTQNDGTTTIANNLTSTVQVFTDSEYQLPYVLGSAHQGCLPPFPADVFMVPQYGYLTLNNGSQAVGRSSFYCLEYFPSQMLRTGNNFQFSYTFEDVPFHSSYAHSQSLDRLMNPLIDQYLYYLNKTQSNSGTLQQSRLLFSQAGPTSMSLQAKNWLPGPCYRQQRLSKQANDNNNSNFPWTAATKYHLNGRDSLVNPGPAMASHKDDEEKFFPMHGTLIFGKQGTNANDADLDNVMITDEEEIRTTNPVATEQYGYVSNNLQDSNTGPTTGTVNHQGALPGMVWQDRDVYLQGPIWAKIPHTDGHFHPSPLMGGFGLKHPPPQIMIKNTPVPANPPTNFSSAKFASFITQYSTGQVSVEIEWELQKENSKRWNPEIQYTSNYNKSVNVDFTVDTNGVYSEPRPIGTRYLTRNL

SEQ ID NO: 1432 - protein, 598 aa, synthetic construct
  REGION 1..598: note = Synthetic
MAPGKKRPVEHSPVEPDSSSGTGKAGQQPARKRLNFGQTGDADSVPDPQPLGQPPAAPSGLGSTTMASGSGAPVADNNEGADGVGNSSGNWHCDSQWLGDRVITTSTRTWALPTYNNHLYKQISSQSGASNDNHYFGYSTPWGYFDFNRFHCHFSPRDWQRLINNSWGFRPKRLNFKLFNIQVKEVTQNDGTTTIANNLTSTVQVFTDSEYQLPYVLGSAHQGCLPPFPADVFMVPQYGYLTLNNGSQAVGRSSFYCLEYFPSQMLRTGNNFQFSYTFEDVPFHSSYAHSQSLDRLLNPLIDQYLYYLNKTQSNSGTLQQSRLLFSQAGPTSMSLQAKNWLPGPCYRQQRLSKQANDNNNSNFPWTAATKYHLNGRDSLVNPGPAMASHKDDEEKFFPMHGTLIFGKQGTNANDADLDNVMITDEEEIRTTNPVATEQYGYVSNNLQNSNTGPTTGTVNHQGALPGMVWQDRDVYLQGPIWAKIPHTDGHFHPSPLMGGFGLKHPPPQIMIKNTPVPANPPTNFSSSKFASFITQYSTGQVSVEIEWELQKENSKRWNPEIQYTSNYNKSVNVDFTVDTNGVYSEPRPIGTRYPTRNL

SEQ ID NO: 1433 - protein, 598 aa, synthetic construct
  REGION 1..598: note = Synthetic
MAPGKKRPVEHSPAEPDSSSGTGKAGQQPARKRLNFGQTGDADSVPDPQPLGQPPAAPSGLGSTTMATGSGAPMADNNEGADGVGNSSGNWHCDSQWLGDRVITTSTRTWALPTYNNHLYKQISSQSGASNDNHYFGYSTPWGYFDFNRFHCHFSPRDWQRLINNNWGFRPKRLNFKLFNIQVKEVTQNDGTTTIANNLTSTVQVFTDSEYQLPYVLGSAHQGCLPPFPADVFMVPQYGYLTLNNGSQAVGRSSFYCLEYFPSQMLRTGNNFQFSYTFEDVPFHSSYAHSQSLDRLMNPLIDQYLYYLNKTQSNSGTLQQSRLLFSQAGPTSMSLQAKNWLPGPCYRQQRLSKQANDNNNSNFPWTAATKYHLNGRDSLVNPGPAMASHKDDEEKFFPMHGTLIFGKQGTNANDADLDNVMITDEEEIRTTNPVATEQYGYVSNNLQNSNTGPTTGTVNHQGALPGMVWQDRDVYLQGPIWAKIPHTDGHFHPSPLMGGFGLKHPPPQIMIKNTPVPANPPTNFSSAKFASFITQYSTGQVSVEIEWELQKENSKRWNPEIQYTSNYNKSVNVDFTVDTNGVYSEPRPIGTRYLTRNL

SEQ ID NO: 1434 - protein, 598 aa, synthetic construct; identical to SEQ ID NO: 1433
  REGION 1..598: note = Synthetic

SEQ ID NO: 1435 - protein, 598 aa, synthetic construct
  REGION 1..598: note = Synthetic
MAPGKKRPVEHSPAEPDSSSGTGKAGQQPARKRLNFGQTGDADSVPDPQPLGQPPAAPSGLGSTTMATGSGAPMADNNEGADGVGNSSGNWHCDSQWLGDRVITTSTRTWAQPTYNNHLYKQISSQSGASNDNHYFGYSTPWGYFDFNRFHCHFSPRDWQRLINNNWGFRPKRLNFKLFNIQVKEVTQNDGTTTIANNLTSTVQVFTDSEYQLPYVLGSAHQGCLPPFPADVFMVPQYGYLTLNNGSQAVGRSSFYCLEYFPSQMLRTGNNFQFSYTFEDVPFHSSYAHSQSLDRLMNPLIDQYLYYLNKTQSNSGALQQSRLLFSQAGPTSMSLQAKNWLPGPCYRQQRLSKQANDNNNSNFPWTAATKYHLNGRDSLVNPGPAMASHKDDEEKFFPMHGTLIFGKQGTNANDADLDNVMITDEEEIRTTNPVATEQYGYVSNNLQNSNTGPTTGTVNHRGALPGMVWQDRDVYLQGPIWAKIPHTDGHFHPSPLMGGFGLKHPPPQIMIKNTPVPANPPTNFSSAKFASFITQYSTGQVSVEIEWELQKENSKRWNPEIQYTSNYNKSVNVDFTVDTNGVYSEPRPIGTRYLTRNL

SEQ ID NO: 1436 - protein, 606 aa, synthetic construct
  REGION 1..606: note = Synthetic
MAPGKKRPVEQSPQEPDSSAGIGKSGAQPAKKRLNFGQTGDTESVPDPQPIGEPPAAPSGVGSLTMASGGGAPVADNNEGADGVGSSSGNWHCDSQWLGDRVITTSTRTWALPTYNNHLYKQISNSTSGGSSNDNAYFGYSTPWGYFDFNRFHCHFSPRDWQRLINNNWGFRPKRLNFKLFNIQVKEVTDNNGVKTIANNLTSTVQVFTDSDYQLPYVLGSAHEGCLPPFPADVFMIPQYGYLTLNDGSQAVGRSSFYCLEYFPSQMLRTGNNFQFSYEFENVPFHSSYAHSQSLDRLMNPLIDQYLYYLSKTINGSGQNQQTLKFSVAGPSNMAVQGRNYIPGPSYRQQRVSTTVTQNNNSEFAWPGASSWALNGRNSLMNPGPAMASHKEGEDRFFPLSGSLIFGKQGTGRDNVDADKVMITNEEEIKTTNPVATESYGQVATNHQSNSRGDYNSLAQAQTGWVQNQGILPGMVWQDRDVYLQGPIWAKIPHTDGNFHPSPLMGGFGMKHPPPQILIKNTPVPADPPTAFNKDKLNSFITQYSTGQVSVEIEWELQKENSKRWNPEIQYTSNYYKSNNVEFAVNTEGVYSEPRPIGTRYLTRNL

SEQ ID NO: 1437 - protein, 608 aa, synthetic construct
  REGION 1..608: note = Synthetic
MAPGKKRPVEQSPQEPDSSAGIGKSGAQPAKKRLNFGQTGDTESVPDPQPIGEPPAAPSGVGSLTMASGGGAPVADNNEGADGVGSSSGNWHCDSQWLGDRVITTSTRTWALPTYNNHLYKQISNSTSGGSSNDNAYFGYSTPWGYFDFNRFHCHFSPRDWQRLINNNWGFRPKRLNFKLFNIQVKEVTDNNGVKTIANNLTSTVQVFTDSDYQLPYVLGSAHEGCLPPFPADVFMIPQYGYLTLNDGSQAVGRSSFYCLEYFPSQMLRTGNNFQFSYEFENVPFHSSYAHSQSLDRLMNPLIDQYLYYLSKTINGSGQNQQTLKFSVAGPSNMAVQGRNYIPGPSYRQQRVSTTVTQNNNSEFAWPGASSWALNGRNSLMNPGPAMASHKEGEDRFFPLSGSLIFGKQGTGRDNVDADKVMITNEEEIKTTNPVATESYGQVATNHQSGQSGRGDAVGVAQAATGWVQNQGILPGMVWQDRDVYLQGPIWAKIPHTDGNFHPSPLMGGFGMKHPPPQILIKNTPVPADPPTAFNKDKLNSFITQYSTGQVSVEIEWELQKENSKRWNPEIQYTSNYYKSNNVEFAVNTEGVYSEPRPIGTRYLTRNL

SEQ ID NO: 1438 - protein, 608 aa, synthetic construct
  REGION 1..608: note = Synthetic
MAPGKKRPVEQSPQEPDSSAGIGKSGAQPAKKRLNFGQTGDTESVPDPQPIGEPPAAPSGVGSLTMASGGGAPVADNNEGADGVGSSSGNWHCDSQWLGDRVITTSTRTWALPTYNNHLYKQISNSTSGGSSNDNAYFGYSTPWGYFDFNRFHCHFSPRDWQRLINNNWGFRPKRLNFKLFNIQVKEVTDNNGVKTIANNLTSTVQVFTDSDYQLPYVLGSAHEGCLPPFPADVFMIPQYGYLTLNDGSQAVGRSSFYCLEYFPSQMLRTGNNFQFSYEFENVPFHSSYAHSQSLDRLMNPLIDQYLYYLSKTINGSGQNQQTLKFSVAGPSNMAVQGRNYIPGPSYRQQRVSTTVTQNNNSEFAWAAASSWALNGRNSLMNPGPAMASHKEGEDRFFPLSGSLIFGKQGTGRDNVDADKVMITNEEEIKTTNPVATESYGQVATNHQSGQSGRGDLGLSAQAATGWVQNQGILPGMVWQDRDVYLQGPIWAKIPHTDGNFHPSPLMGGFGMKHPPPQILIKNTPVPADPPTAFNKDKLNSFITQYSTGQVSVEIEWELQKENSKRWNPEIQYTSNYYKSNNVEFAVNTEGVYSEPRPIGTRYLTRNL

SEQ ID NO: 1439 - protein, 598 aa, synthetic construct
  REGION 1..598: note = Synthetic
MAPGKKRPVEHSPVEPDSSSGTGKAGHQPARKRLNFGQTGDADSVPDPQPLGQPPAAPTSLGSTTMATGSGAPMADNNEGADGVGNSSGNWHCDSQWLGDRVITTSTRTWALPTYNNHLYKQISSQSGASNDNHYFGYSTPWGYFDFNRFHCHFSPRDWQRLINNNWGFRPKRLNFKLFNIQVKEVTQNDGTTTIANNLTSTVQVFTDSEYQLPYVLGSAHQGCLPPFPADVFMVPQYGYLTLNNGSQAVGRSSFYCLEYFPSQMLRTGNNFTFSYTFEDVPFHSSYAHSQSLDRLMNPLIDQYLYYLNRTQSNSGTLQQSRLLFSQAGPTSMSLQAKNWLPGPCYRQQRLSKQANDNNNSNFPWTAATKYRLNGRDSLVNPGPAMASHKDDEEKFFPMHGTLIFGKQGTNANDADLEHVMITDEEEIRTTNPVATEQYGNVSNNLQNSNTGPTTENVNHQGALPGMVWQDRDVYLQGPIWAKIPHTDGHFHPSPLMGGFGLKHPPPQIMIKNTPVPANPPTNFSSAKFASFITQYSTGQVSVEIEWELQKENSKRWNPEIQYTSNYNKSVNVDFTVDTNGVYSEPRPIGTRYLTRNL

SEQ ID NO: 1440 - protein, 598 aa, synthetic construct
  REGION 1..598: note = Synthetic
MAPGKKRPVEHSPVEPDSSSGTGKAGHQPARKRLNFGQTGDADSVPDPQPLGQPPAAPTSLGSTTMATGSGAPMADNNEGADGVGNSSGNWHCDSQWLGDRVITTSTRTWALPTYNNHLYKQISSQSGASNDNHYFGYSTPWGYFDFNRFHCHFSPRDWQRLINNNWGFRPKRLNFKLFNIQVKEVTQNDGTTTIANNLTSTVQVFTDSEYQLPYVLGSAHQGCLPPFPADVFMVPQYGYLTLNNGSQAVGRPSFYCLEYFPSQMLRTGNNFTFSYTFEDVPFHSSYAHSQSLDRLMNPLIDQYLYYLNRTQSNSGTLQQSRLLFSQAGPTSMSLQAKNWLPGPCYRQQRLSKQANDNNNSNFPWTAATKYHLNGRDSLVNPGPAMASHKDDEEKFFPMHGTLIFGKQGTNANDADLEHVMITDEEEIRTTNPVATEQYGNVSNNLQNSNTGPTTENVNHQGALPGMVWQDRDVYLQGPIWAKIPHTDGHFHPSPLMGGFGLKHPPPQIMIKNTPVPANPPTNFSSAKFASFITQYSTGQVSVEIEWELQKENSKRWNPEIQYTSNYNKSVNVDFTVDTNGVYSEPRPIGTRYLTRNL

SEQ ID NO: 1441 - protein, 598 aa, synthetic construct; identical to SEQ ID NO: 1440
  REGION 1..598: note = Synthetic

SEQ ID NO: 1442 - protein, 598 aa, synthetic construct
  REGION 1..598: note = Synthetic
MAPGKKRPVEHSPVEPDSSSGTGKAGHQPARKRLNFGQTGDADSVPDPQPLGQPPAAPTSLGSTTMATGSGAPMADNNEGADGVGNSSGNWHCDSQWLGDRVITTSTRTWALPTYNNHLYKQISSQSGASNDNHYFGYSTPWGYFDFNRFHCHFSPRDWQRLINNNWGFRPKRLNFKLFNIQVKEVTQNDGTTTIANNLTSTVQVFTDSEYQLPYVLGSAHQGCLPPFPADVFTVPQYGYLTLNNGSQAVGRSSFYCLEYFPSQMLRTGNNLTFSYTFEDVPFHSSYAHSQSLDRLMNPLIDQYLYYLNRTQSNSGTLQQSRLLFSQAGPTSMSLQAKNWLPGPCYRQQRLSKQANDNNNSNFPWTAATKYHLNGRDSLVNPGPAMASHKDDEEKFFPMHGTLIFGKQGTNANDADLEHVMITDEEEIRTTNPVATEQYGNVSNNLQNSNTGPTTENVNHQGALPGMVWQDRDVYLQGPIWAKIPHTDGHFHPSPLMGGFGLKHPPPQIMIKNTPVPANPPTNYSSAKFASFITQYSTGQVSVEIEWELRKENSKRWNPEIQYTSNYNKSVNVDFTVDTNGVYSEPRPIGTRYLTRNL

SEQ ID NO: 1443 - protein, 599 aa, synthetic construct
  REGION 1..599: note = Synthetic
MAPGKKRPVEQSPQEPDSSSGIGKTGQQPAKKRLNFGQTGDSESVPDPQPLGEPPATPAAVGPTTMASGGGAPMADNNEGADGVGNASGNWHCDSTWLGDRVITTSTRTWALPTYNNHLYKQISSTSTGASNDNHYFGYGTPWGYFDFNRFHCHFSPRDWQRLINNNWGFRPKRLNFKLFNIQVEEVTTNDGVTTIANNLTSTVQVFSDSEYQLPYVLGSAHQGCLPPFPADVFMIPQYGYLTLNNGSQAVGRSSFYCLEYFPSQMLRTGNNFTFSYTFEEVPFHSSYAHSQSLDRLMNPLIDQYLYYLNRTQNQSGSAQNKDLLFSRGSPAGMSVQPKNWLPGPCYRQQRVSKTKTDNNNSNFTWTGASKYNLNGRESIINPGTAVASHKDDEDKFFPMSGVMIFGKESAGASSTALDNVMITDEEEIKATNPVATERFGTVAVNFQSSSTDPATGDVHAMGALPGMVWQDRDVYLQGPIWAKIPHTDGHFHPSPLMGGFGLKNPPPQILIKNTPVPANPPAEFSATKFASFITQYSTGQVSVEIEWELQKENSKRWNPEVQYTSNYAKSANVDFTVDNNGLYTEPRPIGTRYLTRPL

SEQ ID NO: 1444 - protein, 599 aa, synthetic construct
  REGION 1..599: note = Synthetic
MAPGKKRPVEQSPQGPDSSSGIGKTGQQPAKKRLNFGQTGDSESVPDPQPLGEPPATPAAVGPTTMASGGGAPMADNNEGADGVGNASGNWHCDSTWLGDRVITTSTRTWALPTYNNHLYKQISSASTGASNDNHYFGYSTPWGYFDFNRFHCHFSPRDWQRLINNNWGFRPKRLNFKLFNIQVKEVTTNDGVTTIANNLTSTVQVFSDSEYQLPYVLGSAHQGCLPPFPADVFMIPQYGYLTLNNGSQAVGRSSFYCLEYFPSQMLRTGNNFTFSYTFEEVPFHSSYAHSQSLDRLMNPLIDQYLYYPNRTQNQSGSAQNKDLLFSRGSPAGMSVQPKNWLPGPCYRQQRVSKTKTDNNNSNFTWTGASKYNLNGRESIINPGTAMASHKDDEDKFFPMSGVMIFGKESAGASNTALDNVMITDEEEIKATNPVATERFGTVAVNFQSSSTDPATGDVHAMGALPGMVWQGRDVYLQGPIWAKIPHTDGHFHPSPLMGGFGLKNPPPQILIKNTPVPANPPAEFSATKFASFITQYSTGQVSVEIEWELQKENSKRWNPEVQYTSNYAKSANVDFTVDNNGLYTEPRPIGTRYLTRPL

SEQ ID NO: 1445 - protein, 599 aa, synthetic construct
  REGION 1..599: note = Synthetic
MAPGKKRPVEQSPQEPDSPSGIGKTGQQPAKKRLNFGQTGDSESVPDPQPLGEPPATPAAVGPTTMASGGGAPMADNNEGADGVGNASGNWHCDSTWLGDRVITTSTRTWALPTYNNHLYKQISSASTGASNDNHYFGYSTPWGYFDFNRFHCHFSPRDWQRLINNNWGFRPKRLNFKLFNIQVKEVTTNDGVTTIANNLTSTVQVFSDSEYQLPYVLGSAHQGRLPPFPADVFMIPQYGYLTLNNGSQAVGRSSSYCLEYFPSQMLRTGNNFTFSYTFEEVPLHSSCAHSQSLDRLMNPLIDQYLYYLNRTQNQSGSAQNRDLLFSRGSPAGMSVQPKNWLPGPCYRQQRVSKTKTDNNNSNFTWTGASKYNLNGRESIINPGTAMASHKDDEDKFFPMSGVMIFGKESAGASNTALDNVMITDEEEIKATNPVATERFGTVAVNFQSSSTDPATGDVHAMGALPGMVWQDRDVYLQGPIWAKIPHTDGHFHPSPLMGGFGLKNPPPQILIKNTPVPANPPAEFSATKFASFITQYSAGQVSVEIEWELQKENSKRWNPEVQYTSNYAKSANVDFTVDNNGLYTEPRPIGTRYLTRPL

SEQ ID NO: 1446 - protein, 600 aa, synthetic construct
  REGION 1..600: note = Synthetic
MAPGKKRPVEPSPQRSPDSSTGIGKKGQQPAKKRLNFGQTGDSESVPDPQPIGEPPAGPSGLGSGTMAAGGGAPMADNNEGADGVGNASGNWHCDSTWLGDRVITTSTRTWALPTYNNHLYKQISSASTGASNDNHYFGYSTPWGYFDFNRFHCHFSPRDWQRLINNNWGFRPKRLNFKLFNIQVKEVTTNDGVTTIANNLTSTVQVFSDSEYQLPYVLGSAHQGCLPPFPADVFMIPQYGYLTLNNGSQAVGRSSFYCLEYFPSQMLRTGNNFTFSYTFEEVPLHSSYAHSQSLDRLMNPLIVQYLYYLNRTQNQSGSAQNKDLLFSRGSPAGMSVQPKNWLPGPCYRQQRVSKTKTDNNNSNFTWTGASKYNLNGRESIINPGTAMASHKDDEDKFFPMSGVMIFGKESAGASNTALDNVMITDEEEIKATNPVATERFGTVAVNFQSSSTDPATGDVHAMGALPGMVWQDRDVYLQGPIWAKIPHTDGHFHPSPLMGGFGLKNPPPQILIKNTPVPANPPAEFSATKFASFITQYSTGQVSVEIEWELQKENSKRWNPEVQYTSNYAKSASVDFTVDNNGLYTEPRPIGTRYLTRPL

SEQ ID NO: 1447 - protein, 601 aa, synthetic construct
  REGION 1..601: note = Synthetic
MAPGKKRPVEPSPQRSPDSSTGIGKKGQQPAKKRLNFGQTGDSESVPDPQPIGEPPAGPSGLGSGTMAAGGGAPMADNNEGADGVGSSSGNWHCDSTWLGDRVITTSTRTWALPTYNNHLYKQISNGTSGGSTNDNTYFGYSTPWGYFDFNRFHCHFSPRDWQRLINNNWGFRPKRLSFKLFNIQVKEVTQNEGTKTIANNLTSTIQVFTDSEYQLPYVLGSAHQGCLPPFPADVFMIPQYGYLTLNNGSQAVGRSSFYCLEYFPSQMLRTGNNFEFSYTFEDVPFHSSYAHSQSLDRLMNPLIDQYLYYLSRTQSTGGTQGTQQLLFSQAGPANMSAQAKNWLPGPCYRQQRVSTTLSQNNNSNFAWTGATKYHLNGRDSLVNPGVAMATHKDDEERFFPSSGVLMFGKQGAGRDNVDYSSVMLTSEEEIKTTNPVATEQYGVVADNLQQTNTGPIVGNVNSQGALPGMVWQNRDVYLQGPIWAKIPHTDGNCHPSPLMGGFGLKHPPPQILIKNTPVPADPPTTFSQAKLASFITQYSTGQVSVEIEWELQKENSKRWNPEIQYTSNYYKSTNVDFAVNTEGTYSEPRPIGTRYLTRNL

SEQ ID NO: 1448 - protein, 599 aa, synthetic construct
  REGION 1..599: note = Synthetic
MAPGKKRPVEQSPQEPDSSSGIGKTGQQPAKKRLNFGQTGDSESVPDPQPLGEPPATPAAVGPTTMASGGGAPMADNNEGADGVGNASGNWHCDSTWLGDRVITTSTRTWALPTYNNHLYKQISSASTGASNDNHYFGYSTPWGYFDFNRFHCHFSPRDWQRLINNNWGFRPKRLNFKLFNIQVKEVTTNDGVTTIANNLTSTVQVFSDSEYQLPYVLGSAHQGCLPPFPADVFMIPQYGYLTLNNGSQAVGRSSFYCLEYFPSQMLRTGNNFTFSYTFEEVPFHSSYAHSQSLDRLMNPLIDQYLYYLNRTQNQSGSAQNKDLLFSRGSPAGMSVQPKNWLPGPCYRQQRVSKTKTDNNNSNFTWTGASKYNLNGRESIINPGTAMASHKDDEDKFFPMSGVMIFGKESAGASNTALDNVMITDEEEIKATNPVATERFGTVAVNFQSSSTDPATGDVHAMGALPGMVWQDRDVYLQGPIWAKIPHTDGHFHPSPLMGGFGLKNPPPQILIKNTPVPANPPAEFSATKFASFITQYSTGQVSVEIEWELQKENSKRWNPEVQYTSNYAKSANVDFTVDNNGLYTEPRPIGTRYLTRPL

SEQ ID NO: 1449 - protein, 599 aa, synthetic construct
  REGION 1..599: note = Synthetic
MAPGKKRPVEQSPQEPDSSSGIGKKGQQPARKRLNFGQTGDSESVPDPQPLGEPPAAPSGVGPNTMAAGGGAPMADNNEGADGVGSSSGNWHCDSTWLGDRVITTSTRTWALPTYNNHLYKQISNGTSGGATNDNTYFGYSTPWGYFDFNRFHCHFSPRDWQRLINNNWGFRPKRLSFKLFNIQVKEVTQNEGTKTIANNLTSTIQVFTDSEYQLPYVLGSAHQGCLPPFPADVFMIPQYGYLTLNNGSQAVGRSSFYCLEYFPSQMLRTGNNFQFTYTFEDVPFHSSYAHSQSLDRLMNPLIDQYLYYLSRTQTTGGTANTQTLGFSQGGPNTMANQAKNWLPGPCYRQQRVSTTTGQNNNSNFAWTAGTKYHLNGRNSLANPGIAMATHKDDEERFFPVTGSCFWQQNAARDNADYSDVMLTSEEEIKTTNPVATEEYGIVADNLQQQNTAPQIGTVNSQGALPGMVWQNRDVYLQGPIWAKIPHTDGNFHPSPLMGGFGLKHPPPQILIKNTPVPADPPTTFNQSKLNSFITQYSTGQVSVEIEWELQKENSKRWNPEIQYTSNYYKSTSVDFAVNTEGVYSEPRPIGTRYLTRNL

SEQ ID NO: 1450 - protein, 598 aa, synthetic construct
  REGION 1..598: note = Synthetic
MAPGKKRPVEHSPVEPDSSSGTGKAGQQPARKRLNFGQTGDADSVPDPQPLGQPPAAPSGLGTNTMATGSGAPMADNNEGADGVGNSSGNWHCDSTWMGDRVITTSTRTWALPTYNNHLYKQISSQSGASNDNHYFGYSTPWGYFDFNRFHCHFSPRDWQRLINNNWGFRPKRLNFKLFNIQVKEVTQNDGTTTIANNLTSTVQVFTDSEYQLPYVLGSAHQGCLPPFPADVFMVPQYGYLTLNNGSQAVGRSSFYCLEYFPSQMLRTGNNFTFSYTFEDVPFHSSYAHSQSLGRLMNPLIDQYLYYLSRTNTPSGTTTQSRLQFSQAGASDIRDQSRNWLPGPCYRQQRVSKTSADNNNSEYSWTGATKYHLNGRDSLVNPGPAMASHKDDEEKFFPQSGVLIFGKQGSEKTNVDIEKVMITDEEEIRTTNPVATEQYGSVSTNLQRGNRQAATADVNTQGVLPGMVWQDRDVYLQGPIWAKIPHTDGHFHPSPLMGGFGLKHPPPQILIKNTPVPANPSTTFSAAKFASFITQYSTGQVSVEIEWELQKENSKRWNPEIQYTSNYNKSVNVDFTVDTNGVYSEPRPIGTRYLTRNL

SEQ ID NO: 1451 - protein, 598 aa, synthetic construct
  REGION 1..598: note = Synthetic
MAPGKKRPVEHSPVEPDSSSGTGKAGQQPARKRLNFGQTGDADSVPDPQPLGQPPAAPSGLGSTTMATGSGAPMADNNEGADGVGNSSGNWHCDSQWLGDRVITTSTRTWALPTYNNHLYKQISSQSGASNDNHYFGYSTPWGYFDFNRFHCHFSPRDWQRLINNNWGFRPKRLNFKLFNIQVKEVTQNDGTTTIANNLTSTVQVFTDSEYQLPYVLGSAHQGCLPPFPADVFMVPQYGYLTLNNGSQAVGRSSFYCLEYFPSQMLRTGNNFQFSYTFEDVPFHSSYAHSQSLDRLMNPLVDQYLYYLNKTQTNSGTLQQSRLLFSQAGPTNMSLQAKNWLPGPCYRQQRLSKQANDNNNSNFPWTAATKYHLNGRDSLVNPGPAMASHKDDEEKFFPMHGTLIFGKQGTNANDADLENVMITDEEEIRTTNPVATEQYGTVSNNLQNSNTGPTTGTVNHQGALPGMVWQDRDVYLQGPIWAKIPHTDGHFHPSPLMGGFGLKHPPPQIMIKNTPVPANPPTNFSSAKFASFITQYSTGQVSVEIEWELQKENSKRWNPEIQYTSNYNKSVNVDFTVDTNGVYSEPRPIGTRYLTRNL

SEQ ID NO: 1452 - protein, 598 aa, synthetic construct
  REGION 1..598: note = Synthetic
MAPGKKRPVEHPPVEPDSSSGTGKAGQQPARKRLNFGQTGDADSVPDPQPLGQPPAAPSGLGSTTMATGSGAPMADNNEGADGVGNSSGNWHCDSQWLGDRVITTSTRTWALPTYNNHLYKQISSQSGASNDNHYFGYSTPWGYFDFNRFHCHFSPRDWQRLINNNWGFRPKRLNFKLFNIQVKEVTQNDGTTTIANNLTSTVQVFTDSEYQLPYVLGSAHQGCLPPFPADVFMVPQYGYLTLNNGSQAVGRSSFYCLEYFPSQMLRTGNNFQFSYTFEDVPFHSSYAHSQSLDRLMNPLIDQYLYYLNKTQTNSGTLQQSRLLFSQAGPTNMSLQAKNRLPGPCYRQQRLSKQANDNNNSNFPWTAATKYHLNGRDSLVNPGPAMASHKDDEEKFFPMHGTLIFGKQGTNANDADLENVMITDEEEIRTTNPVATEQYGTVSNNLQNSNTGPTTGTVNHQGALPGMVWQDRDVYLQGPIWAKIPHTDGHFHPSPLVGGFGLKHPPPQIMIKNTPVPANPPTNFSSAKFASFITQYSTGQVSVEIEWELQKENSKRWNPEIQYTSNYNKSVNVDFTVDTNGVYSEPRPIGTRYLTRNL

SEQ ID NO: 1453 - protein, 597 aa, synthetic construct
  REGION 1..597: note = Synthetic
MAPGKKRPVEHSPAEPDSSSGTGKAGQQPARKRLNFGQTGDADSVPDPQPLRQPPAAPTSLGSTTMATGSGAPMADNNEGADGVGNSSGNWHCDSQWLGDRVITTSTRTWALPTYNNHLYKQISSQSGASNDNHYFGYSTPWGYFDFNRFHCHFSPRDWQRLINNNWGFRPKRLNFKLFNIQVKEVTQNDGTTTIANNLTSTVQVFTDSEYQLPYVLGSAHQGCLPPFPADVFMVPQYGYLTLNNGSQAVGRSSFYCLEYFPSQMLRTGNNFQFSYTFEDVPFHSSYAHSQSLDRLMNPLIDQYLYYLNRTQTASGTQQSRLLFSQAGPTSMSLQAKNWLPGPCYRQQRLSKQANDNNNSNFPWTGATKYYLNGRDSLVNPGPAMASHKDDEEKFFPMHGTLIFGKEGTNATNAELENVMITDEEEIRTTNPVATEQYGYVSNNLQNSNTAASTETVNHQGALPGMVWQDRDVYLQGPIWAKIPHTDGHFHPSPLMGGFGLKHPPPQIMIKNTPVPANPPTNFSSAKFASFITQYSTGQVSVEIEWELQKENSKRWNPEIQYTSNYNKSVNVDFTVDTNGVYSEPRPIGTRYLTRNL

SEQ ID NO: 1454 - protein, 597 aa, synthetic construct
  REGION 1..597: note = Synthetic
MAPGKKRPVEHSPAEPDSSSGTGKAGQQPARKRLNFGQTGDADSVPDPQPLGQPPAAPTSLGSTTMATGSGAPMADNNEGADGVGNSSGNWHCDSQWLGDRVITTSTRTWALPTYNNHLYKQISSQSGASNDNHYFGYSTPWGYFDFNRFHCHFSPRDWQRLINNNWGFRPKRLNFKLFNIQVKEVTQNDGTTTIANNLTSTVQVFTDSEYQLPYVLGSAHQGCLPPFPADVFMVPQYGYLTLNNGSQAVGRSSFYCLECFPSQMLRTGNNFQFSYTFEDVPFHSSYAHSQSLDRLMNPLIDQYLYYLNRTQTASGTQQSRLLFSQAGPTSMSLQAKNWLPGPCYRQQRLSKQANDNNNSNFPWTGATKYHLNGRDSLVNPGPAMASHKDDEEKFFPMHGTLIFGKEGTNATNAELENVMITDEEEIRTTNPVATEQYGYVSNNLQNSNTAASTETVNHQGALPGMVWQDRDVYLQGPIWAKIPHTDGHFHPSPLMGGFGLKHPPPQIMIKNTPVPANPPTNFSSAKFASFITQYSTGQVSVEIEWELQKENSKRWNPEIQYTSNYNKSVNVDFTVDTNGVYSEPRPIGTRYLTRNL

SEQ ID NO: 1455 - protein, 597 aa, synthetic construct
  REGION 1..597: note = Synthetic
MAPGKKRPVEHSPAEPDSSSGTGKAGQQPARKRLNFGQTGDADSVPDPQPLGQPPAAPTSLGSTTMATGSGAPMADNNEGADGVGNSSGNWHCDSQWLGDRVITTSTRTWALPTYNNHLYKQISSQSGASNDNHYFGYSTPWGYFDFNRFHCRFSPRDWQRLINNNWGFRPKRLNFKLFNIQVKEVTQNDGTTTIANNLTSTVQVFTDSEYQLPYVLGSAHQGCLPPFPADVFMVPQYGYLTLNNGSQAVGRSSFYCLEYFPSQMLRTGNNFQFSYTFEDVPFHSSYAHSQGLDRLMNPLIDQYLYYLNRTQTASGTQQSRLLFSQAGPTSMSLQAKNWLPGPCYRQQRLSKQANDNNNSNFPWTGATKYHLNGGDSLVNPGPAMASHKDDEEKFFPMHGTLIFGKEGTNATNAELENVMITDEEEIRTTNPVATEQYGYVSNNLQNSNTAASTETVNHQGALPGMVWQDRDVYLRGPIWAKIPHADGHFHPSPLMGGFGLKHPPPQIMIKNTPVPANPPTNFSSAKFASFITQYSTGQVSVEIEWELQKENSKRWNPEIQYTSNYNKSVNVDFTVDTNGVYSEPRPIGTRYLTRNL

SEQ ID NO: 1456 - protein, 598 aa, synthetic construct
  REGION 1..598: note = Synthetic
MAPGKKRPVEHSPVEPDSSSGTGKAGQQPARKRLNFGQTGDADSVPDPQPLGQPPAAPSGLGTNTMATGSGAPMADNNEGADGVGNSSGSWHCDSTWMGDRVITTSTRTWALPTYNNHLYKQISSQSGASNDNHYFGYSTPWGYFDFNRFHCHFSPRDWQRLINNNWGFRPKRLNFKLFNIQVKEVTQNDGTTTIANNLTSTVQVFTDSEYQLPYVPGSAHQGCLPPFPADVFMVPQYGYLTLNNGSQAVGRSSFYCLEYFPSQMLRTGNNFTFSYTFEDVPFHSSYAHSQSLDRLMNPLIDQYLYYLSRTNTPSGTTTQSRLQFSQAGASDIRDQSRNWLPGPCYRQQRVSKTAADNNNSEYSWTGATKYHLNGRDSLVNPGPAMASHKDDEEKFFPQSGVLIFGKQGSEKTNVDIEKVMITDEEEIRTTNPVATEQYGSVSTNLQSGNTQAATADVNTQGVLPGMVWQDRDVHLQGPIWAKIPHTDGHFHPSPLMGGFGLKHPPPQILIKNTPVPANPSTTFSAAKFASFITQYSTGQVSVEIEWELQKENSKRWNPEIQYTSNYNKSVNVDFTVDTNGVYSEPRPIGTRYLTRNL

SEQ ID NO: 1457 - protein, 598 aa, synthetic construct
  REGION 1..598: note = Synthetic
MAPGKKRPVEHSPVEPDSSSGTGKAGQQPARKRLNFGQTGDADSVPDPQPLGQPPAAPSGLGTNTMATGSGAPMADNNEGADGVGNSSGNWHCDSTWMGDRVITTSTRTWALPTYNNHLYKQISSQSGASNDNHYFGYSTPWGYFDFNRFHCHFSPRDWQRLINNNWGFRPKRLNFKLFNIQVKEVTQNDGTTTIANNLTSTVQVFTDSEYQLPYVLGSAHQGCLPPFPADVFMVPQYGYLTLNNGSQAVGRSSFYCLEYFPSQMLRTGNNFTFSYTFEDVPFHSGYAHSQSLDRLMNPLIDQYLYYLSTTNTPSGTTTQSRLQFSQAGASDIRDQSRNWLPGPCYRQQRVSKTSADNNNSEYSWTGATKYHLNGRDSLVNPGPAMASHKDNEEKFFPQSGVLIFGKQGSEKTNVDIEKVMITDEEEIRTTNPVATEQYGSVSTNLQRGNRQAATADVNTQGVLPGMVWQDRDVYLQGPIWAKIPHTDGHFHPSPLMGGFGLKHPPPQILIKNTPVPANPSTTFSAAKFASFITQYSTGQVSVEIEWELQKENSKRWNPEIQYTSNYNKSVNVDFTVDTNGVYSEPRPIGTRYLTRNL

SEQ ID NO: 1458 - protein, 598 aa, synthetic construct
  REGION 1..598: note = Synthetic
MAPGKKRPVEHSPVEPDSSSGTGKAGQQPARKRLNFGQTGDADSVPDPQPLGQPPAAPSGLGTNTMATGSGAPMADNNEGADGVGNSSGNRHCDSTWMGDRVITTSTRTWALPTYNNHLYRQISSQSGASNDNHYFGYSTPWGYFDFNRFHCHFSPRDWQRLINNNWGFRPKRLNFKLFNIQVKEVTQNDGTTTIANNLTSTVQVFTDSEYQLPYVLGSAHQGCLPPFPADVFMVPQYGYLTLSNGSQAVGRSSFYCPEYFPSQMLRTGNNFTFSYTFEDVPFHSSYAHSQSLDRLMNPLIDQYLYYLSTTNTPSGTTTQSRLQFSQAGASDIRDQSRNWLPGPCYRQQRVSKTSADNNNSEYSWTGATKYHLNGRDSLVNPGPAMASHKDNEEKFFPQSGVLIFGKQGSEKTNVDIEKVMITDEEEIRTTNPVATEQYGSVSTNLQRGNRQAATADVNTQGVLPGMVWQDRDVYLQGPIWAKIPHTDGHFHPSPLMGGFGPKHPPPQILIKNTPVPANPSTTFSAAKFASFITQYSTGQVSVEIEWELQKENSKRWNPEIQYTSNYNKSVNVDFTVDTNGVYSEPRPIGTRYLTRNL

SEQ ID NO: 1459 - protein, 598 aa, synthetic construct
  REGION 1..598: note = Synthetic
MAPGKKRPVEHSPVEPDSSSGTGKAGNQPARKRLNFGQTGDADSVPDPQPLGQPPASPSGLGTNTMATGSGAPMADNNEGADGVGNSSGNWHCDSTWMGDRVVTTSTRTWALPTYNNHLYKQISSQSGASNDNHYFGYSTPWGYFDFNRFHCHFSPRDWQRLINNNWGFRPKRLNFKLFNIQVKEVTQNDGTTTIANNLTSTVQVFTDLEYQLPYVLGSAHQGCLPPFPADVFMVPQYGYLTLNNGSQAVGRSSFYCLEYFPSQMLRTGNNFTFSYTFEDVPFHSSYAHSQSLDRLMNPLIDQYLYYLSRTNTPSGTTTQSRLQFSQAGASDIRDQSRNWLPGPCYRQQRVSKTAADNNNSEYSWTGATKYHLNGRDSLVNPGPAMASHKDDEEKFFPQSGVLIFGKQGSEKTNVDIEKVMITDEEEIRTTNPVATEQYGSVSTNLQSGNTQAATSDVNTQGVLPGMVWQDRDVYLQGPIWAKIPHTDGHFHPSPLMGGFGLKHPPPQILIKNTPVPANPSTTFSAAKFASFITQYSTGQVSVEIEWELQKENSKRWNPEIQYTSNYNKSVNVDFTVDTNGVYSEPRPIGTRYLTRNL

SEQ ID NO: 1460 - protein, 598 aa, synthetic construct
  REGION 1..598: note = Synthetic
MAPGKKRPVEHSPVEPDSSSGTGKAGNQPARKRLNFGQTGDADSVPDPQPLGQPPAAPSGLGTNTMATGSGAPMADNNEGADGVGNSSGDWHCDSTWMGDRVITTSTRTWALPTYNNHLYKQISSQSGASNDNHYFGYSTPWGYFDFNRFHCHFSPRDWQRLINNNWGFRPKRLNLKLFNIQVKEVTQNDGTTTIANNLTSTVQVFTDLEYQLPYVLGSAHQGCLPPFPADVFMVPQYGYLTLNNGSQAVGRSSFYCLEYFPSQMLRTGNNFTFSYTFEDVPFHSSYAHSQSLDRLMNPLIDQYLYYLSRTNTPSGTTTQSRLQFSQAGASDIRDQSRNWLPGPCYRQQRVSKTAADNNNGEYSWTGATKYHLNGRDSLVNPGPAMASHKDDEEKFFPQSGVLIFGKQGSEKTNVDIEKVMITDEEEIRTTNPVATEQYGSVSTNLQSGNTRAATSDVNTQGVLPGMVWQDRDVYLQGPIWAKIPHTDGHFHPSPLMGGFGLKHPPPQILIKNTPVPANPSTTFSAAKFASFITQYSTGQVSVEIEWELQKENSKRWNPEIQYTSNYNKSVNVDFTVDTNGVYSEPRPIGTRYLTRNL

SEQ ID NO: 1461 - protein, 598 aa, synthetic construct
  REGION 1..598: note = Synthetic
MAPGKKRPVEHSPVEPDSSSGTGKAGNQPARKRLNFGQTGDADSVPDPQPLGQPPAAPSGLGTNTMATGSGAPMADNNDGADGVGNSSGNWHCDSTWMGDRVITTSTRTWALPTYNNHLYKQISSQSGASNDNHYFGYSTPWGYFDFNRFHCHFSPRDWQRLINNNWGFRPKRLNFKLFNIQVREVTQNDGTTTIANNLTSTVQVFTDSEYQLPYVLGSAHQGCLPPFPADVFMVPQYGYLTLNNGSQAVGRSSFYCLEYFPSQMLRTGNNFTFSYTFEDVPFHSSYAHSQSLDRLMNPLIDQYLYYLSRTNTPSGTTTQSRLQFSQAGASDIRDQSRNWLPGPCYRQQRVSKTSADNNNSEYSWIGATKYHLNGRDSLVNPGPAMASHKDDEEKFFPQSGVLIFGKQGSEKTNVDIEKVMITDEEEIRTTNPVATEQYGSVSTNLQSGNTQASTADVNTQGVLPGMVWQDRDVYLQGPIWAKIPHTDGHFHPSPLMGGFGLKHPPPQILIKNTPVPANPSTTFSAAKFASFITQYSTGRVSVEIEWELQKENSKRWNPEIQYTSNYNKSVNVDFTVDTNGVYSEPRPIGTRYLTRNL

SEQ ID NO: 1462 - protein, 598 aa, synthetic construct
  REGION 1..598: note = Synthetic
MAPGKKRPVEHSPAEPDSSSGTGKAGQQPARKRLNFGQTGDADSVPDPQPLGQPPAAPSGLGTNTMATGSGAPMADNNEGADGVGNSSGNWHCDSTWMGDRVITTSTRTWALPTYNNHLYKQISSQSGASNDNHYFGYSTPWGYFDFNRFHCHFSPRDWQRLINNNWGFRPKRLNFKLFNIQVKEVTQNDGTTTIANNLTSTVQVFTDSEYQLPYVLGSAHQGCLPPFPADVFMVPQYGYLTLNNGSQAVGRSSFYCLEYFPSQMLRTGNNFTFSYTFEDVPFHSSYAHSQSLDRLMNPLIDQYLYYLSRTNTPSGTTTQSRLQFSQAGASDIRDQSRNWLPGPCYRQQRVSKTSADNNNSEYSWTGATKYHLNGRDSLVNPGPAMASHKDDEEKFFPQSGVLIFGKQDSGKTNVDIEKVMITDEEEIRTTNPVATEQYGSVSTNLQSGNTQAATSDVNTQGVLPGMVWQDRDVYLQGPIWAKIPHTDGHFHPSPLMGGFGLKHPPPQILIKNTPVPANPSTTFSAAKFASFITQYSTGQVSVEIEWELQKENSKRWNPEIQYTSNYNKSVNVDFTVDTNGVYSEPRPIGTRYLTRNL

SEQ ID NO: 1463 - protein, 598 aa, synthetic construct
  REGION 1..598: note = Synthetic
MAPGKKRPVEHSLAEPDSSSGTGKAGQQPARRRLNFGQTGDADSVPDPQPLGQPPAAPSGLGTNTMATGSGAPMADNNEGADGVGNSSGNWHCDSTWMGDRVITTSTRTWALPTYNNHLYRQISSQSGASNDNHYFGYSTPWGYFDFNRFHCHFSPRDWQRLINNNWGSRPKRLNFKLFNIQVKEVTQNDGTTTIANNLTSTVQVFTDSEYQLPYVLGSAHQGCLPPFPADVFMVPQYGYLTLNNGSQAVGRSSFYCLEYFPSQMLRTGNNFTFSYTFEDVPFHSSYAHSQSLDRLMNPLVDQYLYYLSRTNTPSGTTTQSRLQFSQAGASDIRDQSRNWLPGPCYRQQRVSKTSADNNNSEYSWTGATKYHLNGRDSLVNPGPAMASHKDDEEKFFPQSGVLIFGKQDSGKTNVDIEKVMITDEEEIRTTNPVATEQYGSVSTNLQSGNTQAATSDVNTQGVLPGMVWQDRDVYLQGPIWAKIPHTDGHFHPSPLMGGFGLKHPPPQILIKNTPVPANPSTTFSAAKFASFITQYSTGQVSVEIEWELQKENSKRWNPEIQYTSNYNKSVNVDFTVDTNGVYSEPRPIGTRYLTRNL

SEQ ID NO: 1464 - protein, 601 aa, synthetic construct
  REGION 1..601: note = Synthetic
MAPGKKRPVEPSPQRSPDSSAGIGKKGQQPAKKRLNFGQTGDSESVPDPQPIGEPPAGPSGLGSGTMAAGGGAPMADNNEGADGVGSSSGNWHCDSTWLGDRVITTSTRTWALPTYNNHLYKQISNGTSGGSTNDNTYFGYSTPWGYFDFNRFHCHFSPRDWQRLINNNWGFRPKRLSFKLFNIQVKEVTQNEGTETIANNLTSTIQVFTDSEYQLPYVLGSAHQGCLPPFPADVFMIPQYGYLTLNNGSQAVGRSSFYCLEYFPSQMLRTGNNFEFSYTFEDVPFHSSCAHSQSSDRLMNPLIDQYLYYLSRTRSTGGTQGTQQLLFSQAGPANMSAQAKNWLPGPCYRQQRVSTTLSQNNNSNFAWTGATKYHLNGRDSLVNPGVAMATHKDDEERFFPSSGVLMFGKQGAGRDNVDYSSVMLTSEEEIKTTNPVATEQYGVVADNLQQTNTGPIVGNVNSQGALPGMVWQNRDVYLQGPIWAKIPHTDGNFHPSPLMGGFGLKHPPPQILIKNTPVPADPPTTFSQAKLASFITQYSTGQVSVEIEWELQKENSKRWNPEIQYTSNYYKSTNVDFAVNTEGTYSEPRPIGTRYLTRNL

SEQ ID NO: 1465 - protein, 601 aa, synthetic construct
  REGION 1..601: note = Synthetic
MAPGKKRPVEPSPQRSPDSSTGIGKKGQQPAKKRLNFGQTGDSESVPDPQPIGEPPAGPSGLGSGTMAAGGGAPMADNNEGADGVGSSSGNWHCDSTWLGDRVITTSTRTWALPTYNNHLYKQISNGTSGGSTNDNTYFGYSTPWGYFDFNRFHCHFSPRDWQRLINNNWGFRPKRLSFKLFNIQVKEVTQNEGTKTIANNLTSTIQVFTDSEYQLPYVLGSAHQGCLPPFPADVFMIPQYGYLTLNNGSQAVGRSSFYCLEYFPSQMLRTGNNFEFSYTFEDVPFHSGYAHSQSLDRLMNPLIDQYLYYLSRTQSTGGTQGTQQLLFSQAGPANMSAQAKNWLPGPCYRQQRVSTTLSQNNNSNFAWTGATKYHLNGRDSLVNPGVAMATHKDDEERFFPSSGVLMFGKQGAGRDNVDYSSVMLTSEEEIKTTNPVATEQYGVVADNLQQTNTGPIVGNVNSQGALPGMVWQNRDVYLQGPIWAKIPHTDGNFHPSPLMGGFGLKHPPPQILIKNTPVPADPPTTFSQAKLASFITQYSTGQVSVEIEWELQKENSKRWNPEIQYTSNYYKSTNVDFAVNTEGTYSEPRPIGTRYLTRNL

SEQ ID NO: 1466 - protein, 568 aa, synthetic construct
  REGION 1..568: note = Synthetic
MASGGGAPVADNNEGADGVGSSSGNWHCDSQWLGDRVITTSTRTWALPTYNNHLYKQISNSTSGGSSNDNAYFGYSTPWGYFDFNRFHCHFSPRDWQRLINNNWGFRPKRLNFKLFNIQVKEVTDNNGVKTIANNLTSTVQVFTDSDYQLPYVLGSAHEGCLPPFPADVFMIPQYGYLTLNDGSQAVGRSSFYCLEYFPSQMLRTGNNFQFSYEFENVPFHSSYAHSQSLDRLMNPLIDQYLYYLSKTINGSGQNQQTLKFSVAGPSNMAVQGRNYIPGPSYRQQRVSTTVTQNNNSEFAWPGASSWALNGRNSLMNPGPAMASHKEGEDRFFPLSGSLIFGKQGTGRDNVDADKVMITNEEEIKTTNPVATESYGQVATNHQGQSGRGDLGLSAQAAQTGWVQNQGILPGMVWQDRDVYLQGPIWAKIPHTDGNFHPSPLMGGFGMKHPPPQILIKNTPVPADPPTAFNKDKLNSFITQYSTGQVSVEIEWELQKENSKRWNPEIQYTSNYYKSNNVEFAVNTEGVYSEPRPIGTRYLTRNLEFAVNTEGVYSEPRPIGTRYLTRNL

SEQ ID NO: 1467 - protein, 543 aa, synthetic construct
  REGION 1..543: note = Synthetic
MASGGGAPVADNNEGADGVGSSSGNWHCDSQWLGDRVITTSTRTWALPTYNNHLYKQISNSTSGGSSNDNAYFGYSTPWGYFDFNRFHCHFSPRDWQRLINNNWGFRPKRLNFKLFNIQVKEVTDNNGVKTIANNLTSTVQVFTDSDYQLPYVLGSAHEGCLPPFPADVFMIPQYGYLTLNDGSQAVGRSSFYCLEYFPSQMLRTGNNFQFSYEFENVPFHSSYAHSQSLDRLMNPLIDQYLYYLSKTINGSGQNQQTLKFSVAGPSNMAVQGRNYIPGPSYRQQRVSTTVTQNNNSEFAWAAASSWALNGRNSLMNPGPAMASHKEGEDRFFPLSGSLIFGKQGTGRDNVDADKVMITNEEEIKTTNPVATESYGQVATNHQGQSGRGDLGLSAQAAQTGWVQNQGILPGMVWQDRDVYLQGPIWAKIPHTDGNFHPSPLMGGFGMKHPPPQILIKNTPVPADPPTAFNKDKLNSFITQYSTGQVSVEIEWELQKENSKRWNPEIQYTSNYYKSNNVEFAVNTEGVYSEPRPIGTRYLTRNL

SEQ ID NO: 1468 - protein, 543 aa, synthetic construct
  REGION 1..543: note = Synthetic
MASGGGAPVADNNEGADGVGSSSGNWHCDSQWLGDRVITTSTRTWALPTYNNHLYKQISNSTSGGSSNDNAYFGYSTPWGYFDFNRFHCHFSPRDWQRLINNNWGFRPKRLNFKLFNIQVKEVTDNNGVKTIANNLTSTVQVFTDSDYQLPYVLGSAHEGCLPPFPADVFMIPQYGYLTLNDGSQAVGRSSFYCLEYFPSQMLRTGNNFQFSYEFENVPFHSSYAHSQSLDRLMNPLIDQYLYYLSKTINGSGQNQQTLKFSVAGPSNMAVQGRNYIPGPSYRQQRVSTTVTQNNNSEFAWPGASSWALNGRNSLMNPGPAMASHKEGEDRFFPLSGSLIFGKQGTGRDNVDADKVMITNEEEIKTTNPVATESYGQVATNHQSGQSGRGDLGLSAQAATGWVQNQGILPGMVWQDRDVYLQGPIWAKIPHTDGNFHPSPLMGGFGMKHPPPQILIKNTPVPADPPTAFNKDKLNSFITQYSTGQVSVEIEWELQKENSKRWNPEIQYTSNYYKSNNVEFAVNTEGVYSEPRPIGTRYLTRNL

SEQ ID NO: 1469 - protein, 543 aa, synthetic construct
  REGION 1..543: note = Synthetic
MASGGGAPVADNNEGADGVGSSSGNWHCDSQWLGDRVITTSTRTWALPTYNNHLYKQISNSTSGGSSNDNAYFGYSTPWGYFDFNRFHCHFSPRDWQRLINNNWGFRPKRLNFKLFNIQVKEVTDNNGVKTIANNLTSTVQVFTDSDYQLPYVLGSAHEGCLPPFPADVFMIPQYGYLTLNDGSQAVGRSSFYCLEYFPSQMLRTGNNFQFSYEFENVPFHSSYAHSQSLDRLMNPLIDQYLYYLSKTINGSGQNQQTLKFSVAGPSNMAVQGRNYIPGPSYRQQRVSTTVTQNNNSEFAWPGASSWALNGRNSLMNPGPAMASHKEGEDRFFPLSGSLIFGKQGTGRDNVDADKVMITNEEEIKTTNPVATESYGQVATNHQGQSGRGDAVGVAQAAQTGWVQNQGILPGMVWQDRDVYLQGPIWAKIPHTDGNFHPSPLMGGFGMKHPPPQILIKNTPVPADPPTAFNKDKLNSFITQYSTGQVSVEIEWELQKENSKRWNPEIQYTSNYYKSNNVEFAVNTEGVYSEPRPIGTRYLTRNL

SEQ ID NO: 1470 - protein, 543 aa, synthetic construct
  REGION 1..543: note = Synthetic
MASGGGAPVADNNEGADGVGSSSGNWHCDSQWLGDRVITTSTRTWALPTYNNHLYKQISNSTSGGSSNDNAYFGYSTPWGYFDFNRFHCHFSPRDWQRLINNNWGFRPKRLNFKLFNIQVKEVTDNNGVKTIANNLTSTVQVFTDSDYQLPYVLGSAHEGCLPPFPADVFMIPQYGYLTLNDGSQAVGRSSFYCLEYFPSQMLRTGNNFQFSYEFENVPFHSSYAHSQSLDRLMNPLIDQYLYYLSKTINGSGQNQQTLKFSVAGPSNMAVQGRNYIPGPSYRQQRVSTTVTQNNNSEFAWPGASSWALNGRNSLMNPGPAMASHKEGEDRFFPLSGSLIFGKQGTGRDNVDADKVMITNEEEIKTTNPVATESYGQVATNHQSGQSGRGDAVGVAQAATGWVQNQGILPGMVWQDRDVYLQGPIWAKIPHTDGNFHPSPLMGGFGMKHPPPQILIKNTPVPADPPTAFNKDKLNSFITQYSTGQVSVEIEWELQKENSKRWNPEIQYTSNYYKSNNVEFAVNTEGVYSEPRPIGTRYLTRNL

SEQ ID NO: 1471 - protein, 543 aa, synthetic construct
  REGION 1..543: note = Synthetic
MASGGGAPVADNNEGADGVGSSSGNWHCDSQWLGDRVITTSTRTWALPTYNNHLYKQISNSTSGGSSNDNAYFGYSTPWGYFDFNRFHCHFSPRDWQRLINNNWGFRPKRLNFKLFNIQVKEVTDNNGVKTIANNLTSTVQVFTDSDYQLPYVLGSAHEGCLPPFPADVFMIPQYGYLTLNDGSQAVGRSSFYCLEYFPSQMLRTGNNFQFSYEFENVPFHSSYAHSQSLDRLMNPLIDQYLYYLSKTINGSGQNQQTLKFSVAGPSNMAVQGRNYIPGPSYRQQRVSTTVTQNNNSEFAWAAASSWALNGRNSLMNPGPAMASHKEGEDRFFPLSGSLIFGKQGTGRDNVDADKVMITNEEEIKTTNPVATESYGQVATNHQSGQSGRGDLGLSAQAATGWVQNQGILPGMVWQDRDVYLQGPIWAKIPHTDGNFHPSPLMGGFGMKHPPPQILIKNTPVPADPPTAFNKDKLNSFITQYSTGQVSVEIEWELQKENSKRWNPEIQYTSNYYKSNNVEFAVNTEGVYSEPRPIGTRYLTRNL

SEQ ID NO: 1472 - protein, 543 aa, synthetic construct
  REGION 1..543: note = Synthetic
MASGGGAPVADNNEGADGVGSSSGNWHCDSQWLGDRVITTSTRTWALPTYNNHLYKQISNSTSGGSSNDNAYFGYSTPWGYFDFNRFHCHFSPRDWQRLINNNWGFRPKRLNFKLFNIQVKEVTDNNGVKTIANNLTSTVQVFTDSDYQLPYVLGSAHEGCLPPFPADVFMIPQYGYLTLNDGSQAVGRSSFYCLEYFPSQMLRTGNNFQFSYEFENVPFHSSYAHSQSLDRLMNPLIDQYLYYLSKTINGSGQNQQTLKFSVAGPSNMAVQGRNYIPGPSYRQQRVSTTVTQNNNSEFAWAAASSWALNGRNSLMNPGPAMASHKEGEDRFFPLSGSLIFGKQGTGRDNVDADKVMITNEEEIKTTNPVATESYGQVATNHQGQSGRGDAVGVAQAAQTGWVQNQGILPGMVWQDRDVYLQGPIWAKIPHTDGNFHPSPLMGGFGMKHPPPQILIKNTPVPADPPTAFNKDKLNSFITQYSTGQVSVEIEWELQKENSKRWNPEIQYTSNYYKSNNVEFAVNTEGVYSEPRPIGTRYLTRNL

SEQ ID NO: 1473 - protein, 543 aa, synthetic construct
  REGION 1..543: note = Synthetic
MASGGGAPVADNNEGADGVGSSSGNWHCDSQWLGDRVITTSTRTWALPTYNNHLYKQISNSTSGGSSNDNAYFGYSTPWGYFDFNRFHCHFSPRDWQRLINNNWGFRPKRLNFKLFNIQVKEVTDNNGVKTIANNLTSTVQVFTDSDYQLPYVLGSAHEGCLPPFPADVFMIPQYGYLTLNDGSQAVGRSSFYCLEYFPSQMLRTGNNFQFSYEFENVPFHSSYAHSQSLDRLMNPLIDQYLYYLSKTINGSGQNQQTLKFSVAGPSNMAVQGRNYIPGPSYRQQRVSTTVTQNNNSEFAWAAASSWALNGRNSLMNPGPAMASHKEGEDRFFPLSGSLIFGKQGTGRDNVDADKVMITNEEEIKTTNPVATESYGQVATNHQSGQSGRGDAVGVAQAATGWVQNQGILPGMVWQDRDVYLQGPIWAKIPHTDGNFHPSPLMGGFGMKHPPPQILIKNTPVPADPPTAFNKDKLNSFITQYSTGQVSVEIEWELQKENSKRWNPEIQYTSNYYKSNNVEFAVNTEGVYSEPRPIGTRYLTRNL

SEQ ID NO: 1474 - protein, 542 aa, synthetic construct
  REGION 1..542: note = Synthetic
MASGGGAPVADNNEGADGVGNASGNWHCDSQWLGDRVITTSTRTWALPTYNNHLYKQISSASTGATNDNTYFGYSTPWGYFDFNRFHCHFSPRDWQRLINNNWGFRPKRLNFKLFNIQVKEVTDNNGVKTIANNLTSTVQVFTDSDYQLPYVLGSAHEGCLPPFPADVFMIPQYGYLTLNDGSQAVGRSSFYCLEYFPSQMLRTGNNFQFSYEFENVPFHSSYAHSQSLDRLMNPLIDQYLYYLSKTINGSGQNQQTLKFSVAGPSNMAVQGRNYIPGPSYRQQRVSTTVTQNNNSEFAWPGASSWALNGRNSLMNPGPAMASHKEGEDRFFPLSGSLIFGKQGTGRDNVDADKVMITNEEEIKTTNPVATESYGQVATNHQGQSGRGDLGLSAQAAQTGWVQNQGILPGMVWQDRDVYLQGPIWAKIPHTDGNFHPSPLMGGFGMKHPPPQILIKNTPVPADPPTAFNKDKLNSFITQYSTGQVSVEIEWELQKENSKRWNPEIQYTSNYYKSNNVEFAVNTEGVYSEPRPIGTRYLTRNL

SEQ ID NO: 1475 - protein, 543 aa, synthetic construct
  REGION 1..543: note = Synthetic
MASGGGAPMADNNEGADGVGNASGNWHCDSTWLGDRVITTSTRTWALPTYNNHLYKQISNGTSGGATNDNTYFGYSTPWGYFDFNRFHCHFSPRDWQRLINNNWGFRPKRLNFKLFNIQVKEVTDNNGVKTIANNLTSTVQVFTDSDYQLPYVLGSAHEGCLPPFPADVFMIPQYGYLTLNDGSQAVGRSSFYCLEYFPSQMLRTGNNFQFSYEFENVPFHSSYAHSQSLDRLMNPLIDQYLYYLSKTINGSGQNQQTLKFSVAGPSNMAVQGRNYIPGPSYRQQRVSTTVTQNNNSEFAWPGASSWALNGRNSLMNPGPAMASHKEGEDRFFPLSGSLIFGKQGTGRDNVDADKVMITNEEEIKTTNPVATESYGQVATNHQGQSGRGDLGLSAQAAQTGWVQNQGILPGMVWQDRDVYLQGPIWAKIPHTDGNFHPSPLMGGFGMKHPPPQILIKNTPVPADPPTAFNKDKLNSFITQYSTGQVSVEIEWELQKENSKRWNPEIQYTSNYYKSNNVEFAVNTEGVYSEPRPIGTRYLTRNL

SEQ ID NO: 1476 - protein, 543 aa, synthetic construct
  REGION 1..543: note = Synthetic
MASGGGAPMADNNEGADGVGNASGNWHCDSTWLGDRVITTSTRTWALPTYNNHLYKQISNGTSGGATNDNAYFGYSTPWGYFDFNRFHCHFSPRDWQRLINNNWGFRPKRLNFKLFNIQVKEVTDNNGVKTIANNLTSTVQVFTDSDYQLPYVLGSAHEGCLPPFPADVFMIPQYGYLTLNDGSQAVGRSSFYCLEYFPSQMLRTGNNFQFSYEFENVPFHSSYAHSQSLDRLMNPLIDQYLYYLSKTINGSGQNQQTLKFSVAGPSNMAVQGRNYIPGPSYRQQRVSTTVTQNNNSEFAWPGASSWALNGRNSLMNPGPAMASHKEGEDRFFPLSGSLIFGKQGTGRDNVDADKVMITNEEEIKTTNPVATESYGQVATNHQGQSGRGDLGLSAQAAQTGWVQNQGILPGMVWQDRDVYLQGPIWAKIPHTDGNFHPSPLMGGFGMKHPPPQILIKNTPVPADPPTAFNKDKLNSFITQYSTGQVSVEIEWELQKENSKRWNPEIQYTSNYYKSNNVEFAVNTEGVYSEPRPIGTRYLTRNL

SEQ ID NO: 1477 - protein, 543 aa, synthetic construct
  REGION 1..543: note = Synthetic
MASGGGAPVADNNEGADGVGSSSGNWHCDSQWLGDRVITTSTRTWALPTYNNHLYKQISNSTSGGSSNDNAYFGYSTPWGYFDFNRFHCHFSPRDWQRLINNNWGFRPKRLNFKLFNIQVKEVTDNNGVKTIANNLTSTVQVFTDSDYQLPYVLGSAHEGCLPPFPADVFMIPQYGYLTLNDGSQAVGRSSFYCLEYFPSQMLRTGNNFQFSYEFENVPFHSSYAHSQSLDRLMNPLIDQYLYYLSKTINGSGQNQQTLKFSVAGPSNMAVQGRNYIPGPSYRQQRVSTTVTQNNNSEFAWPGASSWALNGRNSLMNPGPAMASHKEGEDRFFPLSGSLIFGKQGTGRDNVDADKVMITNEEEIKTTNPVATESYGQVATNHQGQSGRGDLGLSAQAAQTGWVQNQGILPGMVWQDRDVYLQGPIWAKIPHTDGNFHPSPLMGGFGLKHPPPQILIKNTPVPADPPAEFSATKFASFITQYSTGQVSVEIEWELQKENSKRWNPEVQYTSNYAKSANVDFTVDNNGLYTEPRPIGTRYLTRPL

SEQ ID NO: 1478 - protein, 541 aa, synthetic construct
  REGION 1..541: note = Synthetic
MASGGGAPVADNNEGADGVGSSSGNWHCDSQWLGDRVITTSTRTWALPTYNNHLYKQISNSTSGGSSNDNAYFGYSTPWGYFDFNRFHCHFSPRDWQRLINNNWGFRPKRLNFKLFNIQVKEVTDNNGVKTIANNLTSTVQVFTDSDYQLPYVLGSAHEGCLPPFPADVFMIPQYGYLTLNDGSQAVGRSSFYCLEYFPSQMLRTGNNFQFSYEFENVPFHSSYAHSQSLDRLMNPLIDQYLYYLSKTINGSGQNQQTLKFSVAGPSNMAVQGRNYIPGPSYRQQRVSTTVTQNNNSEFAWPGASSWALNGRNSLMNPGPAMASHKEGEDRFFPLSGSLIFGKQGTGRDNVDADKVMITNEEEIKTTNPVATESYGQVATNHQSNSRGDYNSLAQAQTGWVQNQGILPGMVWQDRDVYLQGPIWAKIPHTDGNFHPSPLMGGFGMKHPPPQILIKNTPVPADPPTAFNKDKLNSFITQYSTGQVSVEIEWELQKENSKRWNPEIQYTSNYYKSNNVEFAVNTEGVYSEPRPIGTRYLTRNL

SEQ ID NO: 1479 - protein, 541 aa, synthetic construct; identical to SEQ ID NO: 1478
  REGION 1..541: note = Synthetic

SEQ ID NO: 1480 - protein, 534 aa, synthetic construct
  REGION 1..534: note = Synthetic
MASGGGAPVADNNEGADGVGSSSGNWHCDSQWLGDRVITTSTRTWALPTYNNHLYKQISNSTSGGSSNDNAYFGYSTPWGYFDFNRFHCHFSPRDWQRLINNNWGFRPKRLNFKLFNIQVKEVTDNNGVKTIANNLTSTVQVFTDSDYQLPYVLGSAHEGCLPPFPADVFMIPQYGYLTLNDGSQAVGRSSFYCLEYFPSQMLRTGNNFQFSYEFENVPFHSSYAHSQSLDRLMNPLIDQYLYYLSKTINGSGQNQQTLKFSVAGPSNMAVQGRNYIPGPSYRQQRVSTTVTQNNNSEFAWPGASSWALNGRNSLMNPGPAMASHKEGEDRFFPLSGSLIFGKQGTGRDNVDADKVMITNEEEIKTTNPVATESYGQVATNHQSAQAQAQTGWVQNQGILPGMVWQDRDVYLQGPIWAKIPHTDGNFHPSPLMGGFGMKHPPPQILIKNTPVPADPPTAFNKDKLNSFITQYSTGQVSVEIEWELQKENSKRWNPEIQYTSNYYKSNNVEFAVNTEGVYSEPRPIGTRYLTRNL

SEQ ID NO: 1481 - protein, 533 aa, synthetic construct
  REGION 1..533: note = Synthetic
MASGSGAPMADNNEGADGVGNSSGNWHCDSTWMGDRVITTSTRTWALPTYNNHLYKQISSQSGASNDNHYFGYSTPWGYFDFNRFHCHFSPRDWQRLINNNWGFRPKRLNFKLFNIQVKEVTQNDGTTTIANNLTSTVQVFTDSEYQLPYVLGSAHQGCLPPFPADVFMVPQYGYLTLNNGSQAVGRSSFYCLEYFPSQMLRTGNNFTFSYTFEDVPFHSSYAHSQSLDRLMNPLIDQYLYYLSRTNTPSGTTTQSRLQFSQAGASDIRDQSRNWLPGPCYRQQRVSKTSADNNNSEYSWTGATKYHLNGRDSLVNPGPAMASHKDDEEKFFPQSGVLIFGKQGSEKTNVDIEKVMITDEEEIRTTNPVATEQYGSVSTNLQGGNTQAATADVNTQGVLPGMVWQDRDVYLQGPIWAKIPHTDGHFHPSPLMGGFGLKHPPPQILIKNTPVPANPSTTFSAAKFASFITQYSTGQVSVEIEWELQKENSKRWNPEIQYTSNYNKSVNVDFTVDTNGVYSEPRPIGTRYLTRNL

SEQ ID NO: 1482 - protein, 533 aa, synthetic construct
  REGION 1..533: note = Synthetic
MASGSGAPMADNNEGADGVGNSSGNWYCDSTWMGDRVITTSTRTWALPTYNNHLYKQISSQSGASNDNHYFGYSTPWGYFDFNRFHCHFSPRDWQRLINNNWGFRPKRLSFKLFNIQVKEVTQNDGTTTIANNLTSTVQVFTDSEYQLPYVLGSAHQGCLPPFPADVFMVPQYGYLTLNNGSQAVGRSSFYCLEYFPSQMLRTGNNFTFSYTFEDVPFHSSYAHSQSLDRLMNPLIDQYLYYLSRTNTPSGTTTMSRLQFSQAGASDIRDQSRNWLPGPCYRQQRVSKTAADNNNSDYSWTGATKYHLNGRDSLVNPGPAMASHKDDEEKYFPQSGVLIFGKQDSGKTNVDIEKVMITDEEEIRTTNPVATEQYGSVSTNLQSGNTQAATSDVNTQGVLPGMVWQDRDVYLQGPIWAKIPHTDGHFHPSPLVGGFGLKHPPPQILIKNTPVPANPSTTFSAAKFASFITQYSTGQVSVEIEWELQKENSKRWNPEIQYTSNYNKSVNVDFTVDTNGVYSEPRPIGTRYLTRNL

SEQ ID NO: 1483 - protein, 533 aa, synthetic construct
  REGION 1..533: note = Synthetic
MASGSGAPMADNNEGADGVGNSSGNWHCDSTWMGDRVITTSTRTWALPTYNNHLYKQISSQSGASNDNHYFGYSTPWGHFDFNRFHCHFSPRDWQRLINNNWGFRPKRLSFKLFNIQVKEVTQNDGTTTIANNLTSTVQVFTDSEYQLPYVLGSAHQGCLPPFPADVFMVPQYGYLTLNNGSQAVGRSSFYCLEYFPSQMLRTGNNFTFSYTFEDVPFHSSYAHSQSLDRLMNPLIDQYLYYLSRTNTPSGTTTMSRLQFSQAGASDIRDQSRNWLPGPCYRQQRVSKTAADNNNSDYSWTGATKYHLNGRDSLVNPGPAMASHKDDEEKYFPQSGVLIFGKQDSGKTNVDIEKVMITDEEEIRTTNPVATEQYGSVSTNLQSGNTQAATSDVNTQGVLPGMVWQDRDVYLQGPIWAKIPHTDGHFHPSPPMGGFGLKHPPPQILIKNTPVPANPSTTFSAAKFASFITQYSTGQVSVEIEWELQKENSKRWNPEIQYTSNYNKSVNVDFTVDTNGVYSEPRPIGARYLTRNL

SEQ ID NO: 1484 - protein, 533 aa, synthetic construct
  REGION 1..533: note = Synthetic
MASGSGAPMADNNEGADGVGNSSGNWHCDSTWMGDRVITTSTRTWALPTYNNHLYKQISSQSGASNDNHYFGYSTPWGYFDFNRFHCHFSPRDWQRLINNNWGFRPKRLSFKLFNIQVKEVTQNDGTTTIANNLTSTVQVFTDSEYQLPYVLGSAHQGCLPPFPADVFMVPQYGYLTLNNGSQAVGRSSFYCLEYFPSQMLRTGNNFTFSYTFEDVPFHSSYAHSQSLDRLMNPLIDQYLYYLSRTNTPSGTTTMSRLQFSQAGASDIRDQSRNWLPGPCYRQQRVSKTAADNNNSDYSWTGATKYHLNGRDSLVNPGPAMASHKDDEEKYFPQSGVLIFGKQDSGKTNVDIEKVMITDEEEIRTTNPVATEQYGSVSTNLQSGNTQAATSDVNTQGVLPGMVWQDRDVYLQGPIWAKIPHTDGHFHPSPLMGGFGLKHPPPQILIKNTPVPANPSTTFSAAKFASFITQYSTGQVSVEIEWELQKENSKRWNPEIQYTSNYNKSVNVDFTVDTNGVYSEPRPIGTRYLTRNL

SEQ ID NO: 1485 - protein, 533 aa, synthetic construct; identical to SEQ ID NO: 1484
  REGION 1..533: note = Synthetic

SEQ ID NO: 1486 - protein, 533 aa, synthetic construct
  REGION 1..533: note = Synthetic
MASGSGAPMADNNEGADGVGNSSGNWHCDSTWMGDRVITTSTRTWALPTCNNHLYKQISSQSGASNDNHYFGYSTPWGYFDFNRFHCHFSPRDWQRLINNNWGFRPKRLSFKLFNIQVKEVTQNDGTTTIANNLTSTVQVFTDSEYQLPYVLGSAHQGCLPPFPADVFMVPQYGYLTLNNGSQAVGRSSFYCLEYFPSQMLRTGNNFTFSYTFEDVPFHSSYAHSQSLDRLMNPLIDQYLYYLSRTNTPSGTTTMSRLQFSQAGASDIRDQSRNWLPGPCYRQQRVSKTAADNNNSDYSWTGATKYHLNGRDSLVNPGPAMASHKDDEEKYFPQSGVLIFGKQDSGKTNVDIEKVMITDEEEIRTTNPVATEQYGSVSTYLQSGNTQAATSDVNTQGVLPGMVWQDRDVYLRGPIWAKIPHTDGHFHPSPLMGGFGLKHPPPQILIKNTPVPANPSTTFSAAKFASFITQYSTGQVSVEIEWELQKENSKRWNPEIQYTSNYNKSVNVDFTVDTNGVYSEPRPIGTRYLTRNL

SEQ ID NO: 1487 - protein, 533 aa, synthetic construct; identical to SEQ ID NO: 1486
  REGION 1..533: note = Synthetic

SEQ ID NO: 1488 - protein, 533 aa, synthetic construct; identical to SEQ ID NO: 1484
  REGION 1..533: note = Synthetic

SEQ ID NO: 1489 - protein, 533 aa, synthetic construct
  REGION 1..533: note = Synthetic
MASGSGAPMADNNEGADGVGNSSGNWHCDSTWMGDRVITTSTRTWALPTYNNHLYKQISSQSGASNDNHYFGYSTPWGYFDFNRFHCHFSPRDWQRLINNNWGFRPKRLSFKLFNIQVKEVTQNDGTTTIANNLTSTVQVFTDSGYQLPYVLGSAHQGCLPPFPADVFMVPQYGYLTLNNGSQAVGRSSFYCLEYFPSQMLRTGNNFTFSYTFEDVPFHSSYAHGQSLDRLMNPLIDQYLYYLSRTNTPSGTTTMSRLQFSQAGASDVRDQSRNWLPGPCYRQQRVSKTAADNNNSDYSWTGATKYHLNGRDSLVNPGPAMASHKDDEEKYFPQSGVLVFGKQDSGKTNVDIEKVMITDEEEIRTTNPAATEQYGSVSTNLQSGNTQAATSDVNTQGVLPGMVWQDRDVYLQGPIWAKIPHTDGHFHPSPLMGGFGLKHPPPQILIKNTPVPANPSTTFSAAKFVSFITQYSTGQVSVEIEWELQKENSKRWNPEIQYTSNYNKSVNVDFTVDTNGVYSEPRPIGTRYLTRNL

SEQ ID NO: 1490 - protein, 533 aa, synthetic construct
  REGION 1..533: note = Synthetic
MASGSGAPVADNNEGADGVGNSSGNWHCDSQWLGDRVITTSTRTWALPTYNNHLYKQISSQSGASNDNHYFGYSTPWGYFDFNRFHCHFSPRDWQRLINNSWGFRPKRLNFKLFNIQVKEVTQNDGTTTIANNLTSTVQVFTDSEYQLPYVLGSAHQGCLPPFPADVFMVPQYGYLTLNNGSQAVGRSSFYCLEYFPSQMLRTGNNFQFSYTFEDVPFHSSYAHSQSLDRLLNPLIDQYLYYLNKTQSNSGTLQQSRLLFSQAGPTSMSLQAKNWLPGPCYRQQRLSKQANDNNNSNFPWTAATKYHLNGRDSLVNPGPAMASHKDDEEKFFPMHGTLIFGKQGTNANDADLDNVMITDEEEIRTTNPVATEQYGYVSNNLQNSNTGPTTGTVNHQGALPGMVWQDRDVYLQGPIWAKIPHTDGHFHPSPLMGGFGLKHPPPQIMIKNTPVPANPPTNFSSSKFASFITQYSTGQVSVEIEWELQKENSKRWNPEIQYTSNYNKSVNVDFTVDTNGVYSEPRPIGTRYPTRNL

SEQ ID NO: 1491 - protein, 534 aa, synthetic construct
  REGION 1..534: note = Synthetic
MASGGGAPMADNNEGADGVGNASGNWHCDSTWLGDRVITTSTRTWALPTYNNHLYKQISSTSTGASNDNHYFGYGTPWGYFDFNRFHCHFSPRDWQRLINNNWGFRPKRLNFKLFNIQVEEVTTNDGVTTIANNLTSTVQVFSDSEYQLPYVLGSAHQGCLPPFPADVFMIPQYGYLTLNNGSQAVGRSSFYCLEYFPSQMLRTGNNFTFSYTFEEVPFHSSYAHSQSLDRLMNPLIDQYLYYLNRTQNQSGSAQNKDLLFSRGSPAGMSVQPKNWLPGPCYRQQRVSKTKTDNNNSNFTWTGASKYNLNGRESIINPGTAVASHKDDEDKFFPMSGVMIFGKESAGASSTALDNVMITDEEEIKATNPVATERFGTVAVNFQSSSTDPATGDVHAMGALPGMVWQDRDVYLQGPIWAKIPHTDGHFHPSPLMGGFGLKNPPPQILIKNTPVPANPPAEFSATKFASFITQYSTGQVSVEIEWELQKENSKRWNPEVQYTSNYAKSANVDFTVDNNGLYTEPRPIGTRYLTRPL

SEQ ID NO: 1492 - protein, 534 aa, synthetic construct
  REGION 1..534: note = Synthetic
MASGGGAPMADNNEGADGVGNASGNWHCDSTWLGDRVITTSTRTWALPTYNNHLYKQISSASTGASNDNHYFGYSTPWGYFDFNRFHCHFSPRDWQRLINNNWGFRPKRLNFKLFNIQVKEVTTNDGVTTIANNLTSTVQVFSDSEYQLPYVLGSAHQGCLPPFPADVFMIPQYGYLTLNNGSQAVGRSSFYCLEYFPSQMLRTGNNFTFSYTFEEVPFHSSYAHSQSLDRLMNPLIDQYLYYPNRTQNQSGSAQNKDLLFSRGSPAGMSVQPKNWLPGPCYRQQRVSKTKTDNNNSNFTWTGASKYNLNGRESIINPGTAMASHKDDEDKFFPMSGVMIFGKESAGASNTALDNVMITDEEEIKATNPVATERFGTVAVNFQSSSTDPATGDVHAMGALPGMVWQGRDVYLQGPIWAKIPHTDGHFHPSPLMGGFGLKNPPPQILIKNTPVPANPPAEFSATKFASFITQYSTGQVSVEIEWELQKENSKRWNPEVQYTSNYAKSANVDFTVDNNGLYTEPRPIGTRYLTRPL

SEQ ID NO: 1493 - protein, 534 aa, synthetic construct
  REGION 1..534: note = Synthetic
MASGGGAPMADNNEGADGVGNASGNWHCDSTWLGDRVITTSTRTWALPTYNNHLYKQISSASTGASNDNHYFGYSTPWGYFDFNRFHCHFSPRDWQRLINNNWGFRPKRLNFKLFNIQVKEVTTNDGVTTIANNLTSTVQVFSDSEYQLPYVLGSAHQGRLPPFPADVFMIPQYGYLTLNNGSQAVGRSSSYCLEYFPSQMLRTGNNFTFSYTFEEVPLHSSCAHSQSLDRLMNPLIDQYLYYLNRTQNQSGSAQNRDLLFSRGSPAGMSVQPKNWLPGPCYRQQRVSKTKTDNNNSNFTWTGASKYNLNGRESIINPGTAMASHKDDEDKFFPMSGVMIFGKESAGASNTALDNVMITDEEEIKATNPVATERFGTVAVNFQSSSTDPATGDVHAMGALPGMVWQDRDVYLQGPIWAKIPHTDGHFHPSPLMGGFGLKNPPPQILIKNTPVPANPPAEFSATKFASFITQYSAGQVSVEIEWELQKENSKRWNPEVQYTSNYAKSANVDFTVDNNGLYTEPRPIGTRYLTRPL

SEQ ID NO: 1494 - protein, 534 aa, synthetic construct
  REGION 1..534: note = Synthetic
MASGGGAPMADNNEGADGVGNASGNWHCDSTWLGDRVITTSTRTWALPTYNNHLYKQISSASTGASNDNHYFGYSTPWGYFDFNRFHCHFSPRDWQRLINNNWGFRPKRLNFKLFNIQVKEVTTNDGVTTIANNLTSTVQVFSDSEYQLPYVLGSAHQGCLPPFPADVFMIPQYGYLTLNNGSQAVGRSSFYCLEYFPSQMLRTGNNFTFSYTFEEVPFHSSYAHSQSLDRLMNPLIDQYLYYLNRTQNQSGSAQNKDLLFSRGSPAGMSVQPKNWLPGPCYRQQRVSKTKTDNNNSNFTWTGASKYNLNGRESIINPGTAMASHKDDEDKFFPMSGVMIFGKESAGASNTALDNVMITDEEEIKATNPVATERFGTVAVNFQSSSTDPATGDVHAMGALPGMVWQDRDVYLQGPIWAKIPHTDGHFHPSPLMGGFGLKNPPPQILIKNTPVPANPPAEFSATKFASFITQYSTGQVSVEIEWELQKENSKRWNPEVQYTSNYAKSANVDFTVDNNGLYTEPRPIGTRYLTRPL

We claim:

1. An adeno-associated virus (AAV) vector comprising:
a capsid protein comprising at least one modification that results in preferential targeting of the AAV vector to muscle tissue; and
a nucleic acid encoding a full-length MTM1 protein.

2. The AAV vector of claim 1, wherein the capsid protein comprises at least one modification that is an insertion between any two contiguous amino acids between amino acids 262-269, 327-332, 382-386, 452-460, 488-505, 527-539, 545-558, 581-593, 704-714, or any combination thereof in an AAV9 capsid polypeptide or in an analogous position in an AAV1, AAV2, AAV3, AAV4, AAV5, AAV6, AAV7, AAV8, AAV rh.74, AAV rh.10 capsid polypeptide.

3. The AAV vector of claim 1, wherein the capsid protein comprises at least one modification that is a replacement of amino acids 586-88 and an insertion between amino acids 588 and 589 in an AAV9 capsid polypeptide or in an analogous position in an AAV1, AAV2, AAV3, AAV4, AAV5, AAV6, AAV7, AAV8, AAV rh.74, AAV rh.10 capsid polypeptide.

4. The AAV vector of claim 1, wherein the capsid protein comprises at least one modification that is a replacement of amino acids 586-588 and an insertion between amino acids 588 and 589 in an AAV9 capsid polypeptide and wherein the insertion is selected from the sequences in Table 1-4.

5. The AAV vector of claim 1, wherein the vector comprises an AAV vp1 capsid protein, a vp2, capsid protein, and a vp3 capsid protein, wherein;
the amino acid sequence of the vp1 capsid protein is selected from the sequences in Table 5;
the amino acid sequence of the vp2 capsid protein is selected from the sequences in Table 6; and/or
the amino acid sequence of the vp3 capsid protein is selected from the sequences in Table 7.

6. The method of claim 1, wherein the capsid protein further comprises at least one modification that results in reduced liver-tropism of the AAV vector.

7. The AAV vector of claim 1, wherein the nucleic acid encoding the full-length MTM1 protein is operably linked to a muscle specific promoter.

8. The AAV vector of claim 6, wherein the muscle specific promoter is an MHCK7 promoter.

9. The AAV vector of claim 8, wherein the nucleic acid encoding a full-length MTM1 protein comprises an alternatively-spliced exon cassette downstream of the muscle specific promoter, wherein the alternatively-spliced exon cassette comprises an ATG start codon at the 3′ end of the cassette.

10. The AAV vector of claim 10, wherein the alternatively-spliced exon cassette comprises a skeletal muscle-specific exon.

11. The AAV vector of claim 11, wherein the alternatively spliced exon cassette promotes skeletal muscle expression of the nucleic acid.

12. A method of treating X-linked myotubular myopathy (XLMTM), the method comprising administering to a subject afflicted with XLMTM a composition comprising:
an adeno-associated virus (AAV) vector comprising:
a capsid protein comprising at least one modification that results in preferential targeting of the AAV vector to muscle tissue; and
a nucleic acid encoding a full-length MTM1 protein.

13. The method claim 12, wherein the capsid protein comprises at least one modification that is an insertion between any two contiguous amino acids between amino acids 262-269, 327-332, 382-386, 452-460, 488-505, 527-539, 545-558, 581-593, 704-714, or any combination thereof in an AAV9 capsid polypeptide or in an analogous position in an AAV1, AAV2, AAV3, AAV4, AAV5, AAV6, AAV7, AAV8, AAV rh.74, AAV rh.10 capsid polypeptide.

14. The method of claim 12, wherein the capsid protein comprises at least one modification that is a replacement of amino acids 586-88 and an insertion between amino acids 588 and 589 in an AAV9 capsid polypeptide or in an analogous position in an AAV1, AAV2, AAV3, AAV4, AAV5, AAV6, AAV7, AAV8, AAV rh.74, AAV rh.10 capsid polypeptide.

15. The method of claim 12, wherein the capsid protein comprises at least one modification that is a replacement of amino acids 586-588 and an insertion between amino acids 588 and 589 in an AAV9 capsid polypeptide and wherein the insertion is selected from the sequences in Table 1-4.

16. The method of claim 12, wherein the vector comprises an AAV vp1 capsid protein, a vp2, capsid protein, and a vp3 capsid protein, wherein;
the amino acid sequence of the vp1 capsid protein is selected from the sequences in Table 5;
the amino acid sequence of the vp2 capsid protein is selected from the sequences in Table 6; and/or
the amino acid sequence of the vp3 capsid protein is selected from the sequences in Table 7.

17. The method of claim 1, wherein the capsid protein further comprises at least one modification that results in reduced liver-tropism of the AAV vector.

18. The method of claim 1, wherein the nucleic acid encoding the full-length MTM1 protein is operably linked to a muscle specific promoter.

19. The method of claim 8, wherein the muscle specific promoter is an MHCK7 promoter.

20. The method of claim 9, wherein the nucleic acid encoding a full-length MTM1 protein comprises an alternatively-spliced exon cassette downstream of the muscle specific promoter, wherein the alternatively-spliced exon cassette comprises an ATG start codon at the 3′ end of the cassette.

21. The method of claim 20, wherein the alternatively-spliced exon cassette comprises a skeletal muscle-specific exon.

22. The method of claim 21, wherein the alternatively spliced exon cassette promotes skeletal muscle expression of the nucleic acid.
